(19) United States
(12) Patent Application Publication
(10) Pub. No.: US 2019/0093148 A1
(43) Pub. Date: Mar. 28, 2019

(54) GENETIC TESTING FOR PREDICTING RESISTANCE OF SERRATIA SPECIES AGAINST ANTIMICROBIAL AGENTS

(71) Applicant: Ares Genetics GmbH, Vienna (AT)

(72) Inventors: Andreas Keller, Puttlingen (DE); Susanne Schmolke, Erlangen (DE); Cord Friedrich Stahler, Hirschberg an der Bergstrasse (DE); Christina Backes, Saarbrucken (DE); Valentina Galata, Saarbrucken (DE)

(21) Appl. No.: 15/745,645

(22) PCT Filed: Jul. 21, 2016
(86) PCT No.: PCT/EP2016/067442

§ 371 Date: Jan. 17, 2018

(30) Foreign Application Priority Data
Jul. 22, 2015 (EP) PCT/EP2015/066762

(51) Int. Cl. C12Q 1/689; C12Q 1/6869

(52) U.S. Cl. CPC C12Q 1/689; C12Q 2600/156; C12Q 2600/106; C12Q 1/6869

(57) ABSTRACT

The invention relates to a method of determining an infection of a patient with Serratia species potentially resistant to antimicrobial drug treatment, a method of selecting a treatment of a patient suffering from an antibiotic resistant Serratia infection, and a method of determining an antibiotic resistance profile for bacterial microorganisms of Serratia species, as well as computer program products used in these methods. In an exemplary method, a sample (1), is used for molecular testing (2), and then a molecular fingerprint (3) is taken. The result is then compared to a reference library (4), and the result (5) is reported.

[0001] The present invention relates to a method of determining an infection of a patient with Serratia species potentially resistant to antimicrobial drug treatment, a method of selecting a treatment of a patient suffering from an infection with a potentially resistant Serratia strain, and a method of determining an antimicrobial drug, e.g. antibiotic, resistance profile for bacterial microorganisms of Serratia species, as well as computer program products used in these methods.

[0002] Antibiotic resistance is a form of drug resistance whereby a sub-population of a microorganism, e.g. a strain of a bacterial species, can survive and multiply despite exposure to an antibiotic drug. It is a serious and health concern for the individual patient as well as a major public health issue. Timely treatment of a bacterial infection requires the analysis of clinical isolates obtained from patients with regard to antibiotic resistance, in order to select an efficacious therapy. Generally, for this purpose an association of the identified resistance with a certain microorganism (i.e. ID) is necessary.

[0003] Antibacterial drug resistance (ADR) represents a major health burden. According to the World Health Organization's antimicrobial resistance global report on surveillance, ADR leads to 25,000 deaths per year in Europe and 23,000 deaths per year in the US. In Europe, 2.5 million extra hospital days lead to societal cost of 1.5 billion euro. In the US, the direct cost of 2 million illnesses leads to 20 billion dollar direct cost. The overall cost is estimated to be substantially higher, reducing the gross domestic product (GDP) by up to 1.6%.

[0004] Serratia is a genus of Gram-negative, facultative anaerobic, rod-shaped bacteria of the Enterobacteriaceae family. Currently 14 species of Serratia are recognized within the genus, eight of which are associated with human infection. Of all Serratia species, Serratia marcescens is the most common clinical isolate and the most important human pathogen.

[0005] Serratia marcescens is an opportunistic pathogen whose clinical significance has been appreciated only in the last four decades. While S. marcescens is a rare cause of communityacquired infections, it has emerged as an important nosocomial healthcare-associated pathogen and a frequent source of outbreaks of hospital infection, in both adult and pediatric patients. Results from a recent surveillance program in the US and Europe, indicate that Serratia spp. accounts for an average of 6.5% of all Gram negative infection in Intensive Care Units (ranked 5th amongst Gram negative organisms in ICU) and an average of 3.5% in non-ICU patients. Currently Serratia is the seventh most common cause of pneumonia with an incidence of 4.1% in the US, 3.2% in Europe and 2.4% in Latin America, and the tenth most common cause of bloodstream infection with an incidence of 2.0% amongst hospitalized patients.

[0006] Serratia marcescens is rarely associated with primary invasive infection, it operates as a true opportunist producing infection whenever it gains access to a suitably compromised host. Patients most at risk include those with debilitating or immunocompromising disorders, those treated with broadspectrum antibiotics and patients in ICU who are subjected to invasive instrumentation. The indwelling urinary catheter is a major risk factor for infection. The risk of a catheterized patient becoming infected with S. marcescens has been directly related to the proximity of other catheterized patients colonized or infected with the organism. The respiratory tract is also recognized as a major portal of entry with S. marcescens being isolated from the respiratory tract of up to 80% of post-operative patients developing S. marcescens bacteremia. Not surprisingly, common infections include urinary tract infection in patients with indwelling catheters, respiratory tract infection in intubated patients and bloodstream infection in post-surgical patients, especially in those with intravenous catheters.

[0007] In the last two decades Enterobacteriaceae have demonstrated an exceptional ability to acquire, transfer, and modify the expression of multiple antimicrobial resistance genes. As a typical member of the Enterobacteriaceae family Serratia ssp. demonstrates a propensity to express antimicrobial resistance and the emergence and spread of multiresistant strains is becoming a very serious problem over the last decades.

[0008] In general the mechanisms for resistance of bacteria against antimicrobial treatments rely to a very substantial part on the organism's genetics. The respective genes or molecular mechanisms are either encoded in the genome of the bacteria or on plasmids that can be interchanged between different bacteria. The most common resistance mechanisms include:
[0009] 1) Efflux pumps are high-affinity reverse transport systems located in the membrane that transports the antibiotic out of the cell, e.g. resistance to tetracycline.
[0010] 2) Specific enzymes modify the antibiotic in a way that it loses its activity. In the case of streptomycin, the antibiotic is chemically modified so that it will no longer bind to the ribosome to block protein synthesis.
[0011] 3) An enzyme is produced that degrades the antibiotic, thereby inactivating it. For example, the penicillinases are a group of beta-lactamase enzymes that cleave the beta lactam ring of the penicillin molecule.

[0012] In addition, some pathogens show natural resistance against drugs. For example, an organism can lack a transport system for an antibiotic or the target of the antibiotic molecule is not present in the organism.

[0013] Pathogens that are in principle susceptible to drugs can become resistant by modification of existing genetic material (e.g. spontaneous mutations for antibiotic resistance, happening in a frequency of one in about 100 mio bacteria in an infection) or the acquisition of new genetic material from another source. One example is horizontal gene transfer, a process where genetic material contained in small packets of DNA can be transferred between individual bacteria of the same species or even between different species. Horizontal gene transfer may happen by transduction, transformation or conjugation.

[0014] Generally, testing for susceptibility/resistance to antimicrobial agents is performed by culturing organisms in different concentration of these agents.

[0015] In brief, agar plates are inoculated with patient sample (e.g. urine, sputum, blood, stool) overnight. On the next day individual colonies are used for identification of organisms, either by culturing or using mass spectroscopy. Based on the identity of organisms new plates containing increasing concentration of drugs used for the treatment of these organisms are inoculated and grown for additional 12-24 hours. The lowest drug concentration which inhibits growth (minimal inhibitory concentration—MIC) is used to determine susceptibility/resistance for tested drugs. The process takes at least 2 to 3 working days during which the patient is treated empirically. A significant reduction of time-to-result is needed especially in patients with life-threatening disease and to overcome the widespread misuse of antibiotics.

[0016] Recent developments include PCR based test kits for fast bacterial identification (e.g. Biomerieux Biofire Tests, Curetis Unyvero Tests). With these test the detection of selected resistance loci is possible for a very limited number of drugs, but no correlation to culture based AST is given. Mass spectroscopy is increasingly used for identification of pathogens in clinical samples (e.g. Bruker Biotyper), and research is ongoing to establish methods for the detection of susceptibility/resistance against antibiotics.

[0017] For some drugs such it is known that at least two targets are addressed, e.g. in case of Ciprofloxacin (drug bank ID 00537; http://www.drugbank.ca/drugs/DB00537) targets include DNA Topoisomerase IV, DNA Topoisomerase II and DNA Gyrase. It can be expected that this is also the case for other drugs although the respective secondary targets have not been identified yet. In case of a common regulation, both relevant genetic sites would naturally show a co-correlation or redundancy.

[0018] It is known that drug resistance can be associated with genetic polymorphisms. This holds for viruses, where resistance testing is established clinical practice (e.g. HIV genotyping). More recently, it has been shown that resistance has also genetic causes in bacteria and even higher organisms, such as humans where tumors resistance against certain cytostatic agents can be linked to genomic mutations.

[0019] Wozniak et al. (BMC Genomics 2012, 13(Suppl 7):S23) disclose genetic determinants of drug resistance in Staphylococcus aureus based on genotype and phenotype data. Stoesser et al. disclose prediction of antimicrobial susceptibilities for Escherichia coli and Klebsiella pneumoniae isolates using whole genomic sequence data (J Antimicrob Chemother 2013; 68: 2234-2244).

[0020] Chewapreecha et al (Chewapreecha et al (2014) Comprehensive Identification of single nucleotid polymorphisms associated with beta-lactam resistance within pneumococcal mosaic genes. PLoS Genet 10(8): e1004547) used a comparable approach to identify mutations in gram-positive Streptococcus Pneumonia. The fast and accurate detection of infections with Serratia species and the prediction of response to anti-microbial therapy represent a high unmet clinical need.

[0021] This need is addressed by the present invention.

### SUMMARY OF THE INVENTION

[0022] The present inventors addressed this need by carrying out whole genome sequencing of a large cohort of Serratia clinical isolates and comparing the genetic mutation profile to classical culture based antimicrobial susceptibility testing with the goal to develop a test which can be used to detect bacterial susceptibility/resistance against antimicrobial drugs using molecular testing.

[0023] The inventors performed extensive studies on the genome of bacteria of Serratia species either susceptible or resistant to antimicrobial, e.g. antibiotic, drugs. Based on this information, it is now possible to provide a detailed analysis on the resistance pattern of Serratia strains based on individual genes or mutations on a nucleotide level. This analysis involves the identification of a resistance against individual antimicrobial, e.g. antibiotic, drugs as well as clusters of them. This allows not only for the determination of a resistance to a single antimicrobial, e.g. antibiotic, drug, but also to groups of antimicrobial drugs, e.g. antibiotics such as lactam or quinolone antibiotics, or even to all relevant antibiotic drugs.

[0024] Therefore, the present invention will considerably facilitate the selection of an appropriate antimicrobial, e.g. antibiotic, drug for the treatment of a Serratia infection in a patient and thus will largely improve the quality of diagnosis and treatment.

[0025] According to a first aspect, the present invention discloses a diagnostic method of determining an infection of a patient with Serratia species potentially resistant to antimicrobial drug treatment, which can be also described as a method of determining an antimicrobial drug, e.g. antibiotic, resistant Serratia infection of a patient, comprising the steps of:

a) obtaining or providing a sample containing or suspected of containing at least one Serratia species from the patient;
b) determining the presence of at least one mutation in at least two genes from the group of genes listed in Table 1 or Table 2 below, wherein the presence of said at least two mutations is indicative of an infection with an antimicrobial drug resistant, e.g. antibiotic resistant, Serratia strain in said patient.

[0026] An infection of a patient with Serratia species potentially resistant to antimicrobial drug treatment herein means an infection of a patient with Serratia species wherein it is unclear if the Serratia species is susceptible to treatment with a specific antimicrobial drug or if it is resistant to the antimicrobial drug.

TABLE 1
List of genes

| | | | |
|---|---|---|---|
| actP | SMWW4_v1c03050 | amiD | SMWW4_v1c38520 |
| selB | SMWW4_v1c13480 | bglX | SMWW4_v1c14040 |
| SMWW4_v1c13470 | SMWW4_v1c38510 | SMWW4_v1c07960 | SMWW4_v1c19810 |
| folX | SMWW4_v1c00800 | SMWW4_v1c13910 | SMWW4_v1c09360 |
| ybiO | SMWW4_v1c25040 | znuB | nrdH |
| lysR | SMWW4_v1c24620 | SMWW4_v1c24800 | SMWW4_v1c20760 |
| rfaC | SMWW4_v1c21930 | SMWW4_v1c12350 | galT |
| alsK | SMWW4_v1c24810 | glrK | rihB |
| yhiN | alx | SMWW4_v1c44490 | cnu |
| SMWW4_v1c30050 | vasD | impL | SMWW4_v1c16540 |
| SMWW4_v1c13350 | yeaN | SMWW4_v1c40850 | kdpA |
| dppB | ydaN | cysK | yceA |
| yhjK | SMWW4_v1c25770 | | |

[0027] In step b) above, as well as corresponding steps, at least one mutation in at least two genes is determined, so that in total at least two mutations are determined, wherein the two mutations are in different genes.

TABLE 2
List of genes

| | | | |
|---|---|---|---|
| actP | SMWW4_v1c03050 | amiD | SMWW4_v1c38520 |
| selB | SMWW4_v1c13480 | bglX | SMWW4_v1c14040 |
| SMWW4_v1c13470 | SMWW4_v1c38510 | SMWW4_v1c07960 | SMWW4_v1c19810 |
| folX | SMWW4_v1c00800 | SMWW4_v1c13910 | SMWW4_v1c09360 |
| ybiO | SMWW4_v1c25040 | znuB | nrdH |
| lysR | SMWW4_v1c24620 | SMWW4_v1c24800 | SMWW4_v1c20760 |
| rfaC | SMWW4_v1c21930 | SMWW4_v1c12350 | galT |
| alsK | SMWW4_v1c24810 | glrK | rihB |
| yhiN | alx | SMWW4_v1c44490 | cnu |
| SMWW4_v1c30050 | vasD | impL | SMWW4_v1c16540 |
| SMWW4_v1c13350 | yeaN | SMWW4_v1c40850 | kdpA |
| dppB | ydaN | cysK | yceA |
| yhjK | SMWW4_v1c25770 | | |

[0028] According to a second aspect, the present invention relates to a method of selecting a treatment of a patient suffering from an infection with a potentially resistant Serratia stain, e.g. from an antimicrobial drug, e.g. antibiotic, resistant Serratia infection, comprising the steps of:

a) obtaining or providing a sample containing or suspected of containing at least one Serratia species from the patient;
b) determining the presence of at least one mutation in at least two genes from the group of genes listed in Table 1 or Table 2 above, wherein the presence of said at least two mutations is indicative of a resistance to one or more antimicrobial, e.g. antibiotic, drugs;
c) identifying said at least one or more antimicrobial, e.g. antibiotic, drugs; and
d) selecting one or more antimicrobial, e.g. antibiotic, drugs different from the ones identified in step c) and being suitable for the treatment of a Serratia infection.

[0029] A third aspect of the present invention relates to a method of determining an antimicrobial drug, e.g. antibiotic, resistance profile for bacterial microorganisms of Serratia species, comprising:

obtaining or providing a first data set of gene sequences of a plurality of clinical isolates of Serratia species; providing a second data set of antimicrobial drug, e.g. antibiotic, resistance of the plurality of clinical isolates of Serratia species;
aligning the gene sequences of the first data set to at least one, preferably one, reference genome of Serratia, and/or assembling the gene sequence of the first data set, at least in part;
analyzing the gene sequences of the first data set for genetic variants to obtain a third data set of genetic variants; correlating the third data set with the second data set and statistically analyzing the correlation; and
determining the genetic sites in the genome of Serratia associated with antimicrobial drug, e.g. antibiotic, resistance.

[0030] In addition, the present invention relates in a fourth aspect to a method of determining an antimicrobial drug, e.g. antibiotic, resistance profile for a bacterial microorganism belonging to the species Serratia comprising the steps of

a) obtaining or providing a sample containing or suspected of containing the bacterial microorganism;
b) determining the presence of a mutation in at least one gene of the bacterial microorganism as determined by the method according to the third aspect of the present invention;
wherein the presence of a mutation is indicative of a resistance to an antimicrobial, e.g. antibiotic, drug.

[0031] Furthermore, the present invention discloses in a fifth aspect a diagnostic method of determining an infection of a patient with Serratia species potentially resistant to antimicrobial drug treatment, which can, like in the first aspect, also be described as method of determining an antimicrobial drug, e.g. antibiotic, resistant Serratia infection of a patient, comprising the steps of:

a) obtaining or providing a sample containing or suspected of containing a bacterial microorganism belonging to the species Serratia from the patient;
b) determining the presence of at least one mutation in at least one gene of the bacterial microorganism belonging to the species Serratia as determined by the method according to the third aspect of the present invention, wherein the presence of said at least one mutation is indicative of an antimicrobial drug, e.g. antibiotic, resistant Serratia infection in said patient.

[0032] Also disclosed is in a sixth aspect a method of selecting a treatment of a patient suffering from an infection with a potentially resistant Serratia strain, e.g. from an antimicrobial drug, e.g. antibiotic, resistant Serratia infection, comprising the steps of:

a) obtaining or providing a sample containing or suspected of containing a bacterial microorganism belonging to the species Serratia from the patient;
b) determining the presence of at least one mutation in at least one gene of the bacterial microorganism belonging to the species Serratia as determined by the method according to the third aspect of the present invention, wherein the presence of said at least one mutation is indicative of a resistance to one or more antimicrobial, e.g. antibiotic, drugs;
c) identifying said at least one or more antimicrobial, e.g. antibiotic, drugs; and
d) selecting one or more antimicrobial, e.g. antibiotic, drugs different from the ones identified in step c) and being suitable for the treatment of a Serratia infection.

[0033] A seventh aspect of the present invention relates to a method of acquiring, respectively determining, an antimicrobial drug, e.g. antibiotic, resistance profile for a bacterial microorganism of Serratia species, comprising:

obtaining or providing a first data set of gene sequences of a clinical isolate of Serratia species;
providing a second data set of antimicrobial drug, e.g. antibiotic, resistance of a plurality of clinical isolates of Serratia species;
aligning the gene sequences of the first data set to at least one, preferably one, reference genome of Serratia, and/or assembling the gene sequence of the first data set, at least in part;
analyzing the gene sequences of the first data set for genetic variants to obtain a third data set of genetic variants of the first data set;
correlating the third data set with the second data set and statistically analyzing the correlation; and
determining the genetic sites in the genome of Serratia of the first data set associated with antimicrobial drug, e.g. antibiotic, resistance.

[0034] According to an eighth aspect, the present invention discloses a computer program product comprising executable instructions which, when executed, perform a method according to the third, fourth, fifth, sixth or seventh aspect of the present invention.

[0035] Further aspects and embodiments of the invention are disclosed in the dependent claims and can be taken from the following description, FIGURES and examples, without being limited thereto.

### FIGURES

[0036] The enclosed drawings should illustrate embodiments of the present invention and convey a further understanding thereof. In connection with the description they serve as explanation of concepts and principles of the invention. Other embodiments and many of the stated advantages can be derived in relation to the drawings. The elements of the drawings are not necessarily to scale towards each other. Identical, functionally equivalent and acting equal features and components are denoted in the FIGURES of the drawings with the same reference numbers, unless noted otherwise.

[0037] FIG. 1 shows schematically a read-out concept for a diagnostic test according to a method of the present invention.

### DETAILED DESCRIPTION OF THE PRESENT INVENTION

### Definitions

[0038] Unless defined otherwise, technical and scientific terms used herein have the same meaning as commonly understood by one of ordinary skill in the art to which this invention belongs.

[0039] An “antimicrobial drug” in the present invention refers to a group of drugs that includes antibiotics, antifungals, antiprotozoals, and antivirals. According to certain embodiments, the antimicrobial drug is an antibiotic.

[0040] The term “nucleic acid molecule” refers to a polynucleotide molecule having a defined sequence. It comprises DNA molecules, RNA molecules, nucleotide analog molecules and combinations and derivatives thereof, such as DNA molecules or RNA molecules with incorporated nucleotide analogs or cDNA.

[0041] The term “nucleic acid sequence information” relates to information which can be derived from the sequence of a nucleic acid molecule, such as the sequence itself or a variation in the sequence as compared to a reference sequence.

[0042] The term “mutation” relates to a variation in the sequence as compared to a reference sequence. Such a reference sequence can be a sequence determined in a predominant wild type organism or a reference organism, e.g. a defined and known bacterial strain or substrain. A mutation is for example a deletion of one or multiple nucleotides, an insertion of one or multiple nucleotides, or substitution of one or multiple nucleotides, duplication of one or a sequence of multiple nucleotides, translocation of one or a sequence of multiple nucleotides, and, in particular, a single nucleotide polymorphism (SNP).

[0043] In the context of the present invention a “sample” is a sample which comprises at least one nucleic acid molecule from a bacterial microorganism. Examples for samples are: cells, tissue, body fluids, biopsy specimens, blood, urine, saliva, sputum, plasma, serum, cell culture supernatant, swab sample and others. According to certain embodiments, the sample is a patient sample (clinical isolate).

[0044] New and highly efficient methods of sequencing nucleic acids referred to as next generation sequencing have opened the possibility of large scale genomic analysis. The term “next generation sequencing” or “high throughput sequencing” refers to high-throughput sequencing technologies that parallelize the sequencing process, producing thousands or millions of sequences at once. Examples include Massively Parallel Signature Sequencing (MPSS), Polony sequencing, 454 pyrosequencing, Illumina (Solexa) sequencing, SOLiD sequencing, Ion semiconductor sequencing, DNA nanoball sequencing, Helioscope™ single molecule sequencing, Single Molecule SMRT™ sequencing, Single Molecule real time (RNAP) sequencing, Nanopore DNA sequencing, Sequencing By Hybridization, Amplicon Sequencing, GnuBio.

[0045] Within the present description the term “microorganism” comprises the term microbe. The type of microorganism is not particularly restricted, unless noted otherwise or obvious, and, for example, comprises bacteria, viruses, fungi, microscopic algae and protozoa, as well as combinations thereof. According to certain aspects, it refers to one or more Serratia species, particularly Serratia marcescens.

[0046] A reference to a microorganism or microorganisms in the present description comprises a reference to one microorganism as well a plurality of microorganisms, e.g. two, three, four, five, six or more microorganisms.

[0047] A vertebrate within the present invention refers to animals having a vertebrae, which includes mammals—including humans, birds, reptiles, amphibians and fishes. The present invention thus is not only suitable for human medicine, but also for veterinary medicine.

[0048] According to certain embodiments, the patient in the present methods is a vertebrate, more preferably a mammal and most preferred a human patient.

[0049] Before the invention is described in exemplary detail, it is to be understood that this invention is not limited to the particular component parts of the process steps of the methods described herein as such methods may vary. It is also to be understood that the terminology used herein is for purposes of describing particular embodiments only, and is not intended to be limiting. It must be noted that, as used in the specification and the appended claims, the singular forms “a,” “an” and “the” include singular and/or plural referents unless the context clearly dictates otherwise. For example, the term “a” as used herein can be understood as one single entity or in the meaning of “one or more” entities. It is also to be understood that plural forms include singular and/or plural referents unless the context clearly dictates otherwise. It is moreover to be understood that, in case parameter ranges are given which are delimited by numeric values, the ranges are deemed to include these limitation values.

[0050] Regarding the dosage of the antimicrobial, e.g. antibiotic, drugs, it is referred to the established principles of pharmacology in human and veterinary medicine. For example, Forth, Henschler, Rummel “Allgemeine und spezielle Pharmakologie und Toxikologie”, 9th edition, 2005, pp. 781 919, might be used as a guideline. Regarding the formulation of a ready-to-use medicament, reference is made to “Remington, The Science and Practice of Pharmacy”, 22^{nd} edition, 2013, pp. 777-1070.

[0051] Assembling of a gene sequence can be carried out by any known method and is not particularly limited.

[0052] According to certain embodiments, mutations that were found using alignments can also be compared or matched with alignment-free methods, e.g. for detecting single base exchanges, for example based on contigs that were found by assemblies. For example, reads obtained from sequencing can be assembled to contigs and the contigs can be compared to each other.

[0053] According to a first aspect, the present invention relates to a diagnostic method of determining an infection of a patient with Serratia species potentially resistant to antimicrobial drug treatment, which can also be described as method of determining an antimicrobial drug, e.g. antibiotic, resistant Serratia infection of a patient, comprising the steps of:

a) obtaining or providing a sample containing or suspected of containing at least one Serratia species from the patient;
b) determining the presence of at least one mutation in at least two genes from the group of genes consisting of actP, SMWW4_v1c03050, amiD, SMWW4_v1c38520, selB, SMWW4_v1c13480, bglX, SMWW4_v1c14040, SMWW4_v1c13470, SMWW4_v1c38510, SMWW4_v1c07960, SMWW4_v1c19810, folX, SMWW4_v1c00800, SMWW4_v1c13910, SMWW4_v1c09360, ybiO, SMWW4_v1c25040, znuB, nrdH, lysR, SMWW4_v1c24620, SMWW4_v1c24800, SMWW4_v1c20760, rfaC, SMWW4_v1c21930, SMWW4_v1c12350, galT, alsK, SMWW4_v1c24810, girK, rihB, yhiN, alx, SMWW4_v1c44490, cnu, SMWW4_v1c30050, vasD, impL, SMWW4_v1c16540, SMWW4_v1c13350, yeaN, SMWW4_v1c40850, kdpA, dppB, ydaN, cysK, yceA, yhjK, and SMWW4_v1c25770, wherein the presence of said at least two mutations is indicative of an infection with an antimicrobial, e.g. antibiotic, resistant Serratia strain in said patient.

[0054] In this method, as well as the other methods of the invention, the sample can be provided or obtained in any way, preferably non-invasive, and can be e.g. provided as an in vitro sample or prepared as in vitro sample.

[0055] According to certain aspects, mutations in at least two, three, four, five, six, seven, eight, nine or ten genes are determined in any of the methods of the present invention, e.g. in at least two genes or in at least three genes. Instead of testing only single genes or mutants, a combination of several variant positions can improve the prediction accuracy and further reduce false positive findings that are influenced by other factors. Therefore, it is in particular preferred to determine the presence of a mutation in 2, 3, 4, 5, 6, 7, 8 or 9 (or more) genes selected from Table 1 or 2.

[0056] For the above genes, i.e. the genes also denoted in Tables 1 and 2, the highest probability of a resistance to at least one antimicrobial drug, e.g. antibiotic, could be observed, with p-values smaller than 10⁻³⁰, particularly smaller than 10⁻⁴⁰, indicating the high significance of the values (n=438; α=0.05). Details regarding Tables 1 and 2 can be taken from Tables 3 and 4 (4a, 4b, 4c) disclosed in the Examples. Having at least two genes with mutations determined, a high probability of an antimicrobial drug, e.g. antibiotic, resistance could be determined. The genes in Table 1 thereby represent the 50 best genes for which a mutation was observed in the genomes of Serratia species, whereas the genes in Table 2 represent the 50 best genes for which a cross-correlation could be observed for the antimicrobial drug, e.g. antibiotic, susceptibility testing for Serratia species as described below.

[0057] According to certain embodiments, the obtaining or providing a sample containing or suspected of containing at least one Serratia species from the patient in this method—as well as the other methods of the invention—can comprise the following:

[0058] A sample of a vertebrate, e.g. a human, e.g. is provided or obtained and nucleic acid sequences, e.g. DNA or RNA sequences, are recorded by a known method for recording nucleic acid, which is not particularly limited. For example, nucleic acid can be recorded by a sequencing method, wherein any sequencing method is appropriate, particularly sequencing methods wherein a multitude of sample components, as e.g. in a blood sample, can be analyzed for nucleic acids and/or nucleic acid fragments and/or parts thereof contained therein in a short period of time, including the nucleic acids and/or nucleic acid fragments and/or parts thereof of at least one microorganism of interest, particularly of at least one Serratia species. For example, sequencing can be carried out using polymerase chain reaction (PCR), particularly multiplex PCR, or high throughput sequencing or next generation sequencing, preferably using high-throughput sequencing. For sequencing, preferably an in vitro sample is used.

[0059] The data obtained by the sequencing can be in any format, and can then be used to identify the nucleic acids, and thus genes, of the microorganism, e.g. of Serratia species, to be identified, by known methods, e.g. fingerprinting methods, comparing genomes and/or aligning to at least one, or more, genomes of one or more species of the microorganism of interest, i.e. a reference genome, etc., forming a third data set of aligned genes for a Serratia species—discarding additional data from other sources, e.g. the vertebrate. Reference genomes are not particularly limited and can be taken from several databases. Depending on the microorganism, different reference genomes or more than one reference genomes can be used for aligning. Using the reference genome—as well as also the data from the genomes of the other species, e.g. Serratia species—mutations in the genes for each species and for the whole multitude of samples of different species, e.g. Serratia species, can be obtained.

[0060] For example, it is useful in genome-wide association studies to reference the points of interest, e.g. mutations, to one constant reference for enhanced standardization. In case of the human with a high consistency of the genome and 99% identical sequences among individuals this is easy and represents the standard, as corresponding reference genomes are available in databases. In case of organisms that trigger infectious diseases (e.g. bacteria and viruses) this is much more difficult, though. One possibility is to fall back on a virtual pan genome which contains all sequences of a certain genus. A further possibility is the analysis of all available references, which is much more complex. Therein all n references from a database (e.g. RefSeq) are extracted and compared with the newly sequenced bacterial genomes k. After this, matrices (% of mapped reads, % of covered genome) are applied to estimate which reference is best suited to all new bacteria. However, n×k complete alignments are carried out. Having a big number of references, though, stable results can be obtained, as is the case for Serratia.

[0061] According to certain embodiments, the genomes of Serratia species are referenced to one reference genome. However, it is not excluded that for other microorganisms more than one reference genome is used. In the present methods, the reference genome of Serratia is NC_020211 as annotated at the NCBI according to certain embodiments. The reference genome is attached to this application as sequence listing with SEQ ID NO 1.

[0062] The reference sequence was obtained from Serratia strain NC_020211 (http://www.genome.jp/dbget-bin/www_bget?refseq+NC_020211)
[0063] LOCUS NC_020211 5241455 bp DNA circular CON 7 Feb. 2015
[0064] DEFINITION Serratia marcescens WW4, complete genome.
[0065] ACCESSION NC_020211
[0066] VERSION NC_020211.1 GI:448239774
[0067] DBLINK BioProject: PRJNA224116
   [0068] BioSample: SAMN02602965
   [0069] Assembly: GCF_000336425.1
[0070] KEYWORDS RefSeq.
[0071] SOURCE Serratia marcescens WW4
   [0072] ORGANISM Serratia marcescens WW4
      [0073] Bacteria; Proteobacteria; Gammaproteobacteria; Enterobacteriales; Enterobacteriaceae; Serratia.

### REFERENCE 1 (BASES 1 TO 5241455)

[0074] AUTHORS Kuo, P. A., Kuo, C. H., Lai, Y. K., Graumann, P. L. and Tu, J.
   [0075] TITLE Phosphate limitation induces the intergeneric inhibition of Pseudomonas aeruginosa by Serratia marcescens isolated from paper machines
   [0076] JOURNAL FEMS Microbiol. Ecol. 84 (3), 577-587 (2013)
   [0077] PUBMED 23398522

### REFERENCE 2 (BASES 1 TO 5241455)

[0078] AUTHORS Chung, W. C., Chen, L. L., Lo, W. S., Kuo, P. A., Tu, J. and Kuo, C. H.
   [0079] TITLE Complete Genome Sequence of Serratia marcescens WW4
   [0080] JOURNAL Genome Announc 1 (2), E0012613 (2013)
   [0081] PUBMED 23558532
   [0082] REMARK Publication Status: Online-Only

### REFERENCE 3 (BASES 1 TO 5241455)

[0083] AUTHORS Chung, W.-C., Chen, L.-L., Lo, W.-S., Kuo, P.-A., Tu, J. and Kuo, C.-H.
   [0084] TITLE Direct Submission
   [0085] JOURNAL Submitted (26 Nov. 2012) Institute of Plant and Microbial Biology, Academia Sinica, 128 Sec. 2, Academia Rd., Taipei 115, Taiwan

[0086] Alternatively or in addition, the gene sequence of the first data set can be assembled, at least in part, with known methods, e.g. by de-novo assembly or mapping assembly. The sequence assembly is not particularly limited, and any known genome assembler can be used, e.g. based on Sanger, 454, Solexa, Illumina, SOLid technologies, etc., as well as hybrids/mixtures thereof.

[0087] According to certain embodiments, the data of nucleic acids of different origin than the microorganism of interest, e.g. Serratia species, can be removed after the nucleic acids of interest are identified, e.g. by filtering the data out. Such data can e.g. include nucleic acids of the patient, e.g. the vertebrate, e.g. human, and/or other microorganisms, etc. This can be done by e.g. computational subtraction, as developed by Meyerson et al. 2002. For this, also aligning to the genome of the vertebrate, etc., is possible. For aligning, several alignment-tools are available. This way the original data amount from the sample can be drastically reduced.

[0088] Also after such removal of “excess” data, fingerprinting and/or aligning, and/or assembly, etc. can be carried out, as described above, forming a third data set of aligned and/or assembled genes for a Serratia species.

[0089] Using these techniques, genes with mutations of the microorganism of interest, e.g. Serratia species, can be obtained for various species.

[0090] When testing these same species for antimicrobial drug, e.g. antibiotic, susceptibility of a number of antimicrobial drugs, e.g. antibiotics, e.g. using standard culturing methods on dishes with antimicrobial drug, e.g. antibiotic, intake, as e.g. described below, the results of these antimicrobial drug, e.g. antibiotic, susceptibility tests can then be cross-referenced/correlated with the mutations in the genome of the respective microorganism, e.g. Serratia. Using several, e.g. 50 or more than 50, 100 or more than 100, 200 or more than 200, 300 or more than 300, or 400 or more than 400 different species of a microorganism, e.g. different Serratia species, statistical analysis can be carried out on the obtained cross-referenced data between mutations and antimicrobial drug, e.g. antibiotic, susceptibility for these number of species, using known methods.

[0091] Regarding culturing methods, samples can be e.g. cultured overnight. On the next day individual colonies can be used for identification of organisms, either by culturing or using mass spectroscopy. Based on the identity of organisms new plates containing increasing concentration of antibiotics used for the treatment of these organisms are inoculated and grown for additional 12-24 hours. The lowest drug concentration which inhibits growth (minimal inhibitory concentration—MIC) can be used to determine susceptibility/resistance for tested antibiotics.

[0092] Correlation of the nucleic acid/gene mutations with antimicrobial drug, e.g. antibiotic, resistance can be carried out in a usual way and is not particularly limited. For example, resistances can be correlated to certain genes or certain mutations, e.g. SNPs, in genes. After correlation, statistical analysis can be carried out.

[0093] In addition, statistical analysis of the correlation of the gene mutations with antimicrobial drug, e.g. antibiotic, resistance is not particularly limited and can be carried out, depending on e.g. the amount of data, in different ways, for example using analysis of variance (ANOVA) or Student's t-test, for example with a sample size n of 50 or more, 100 or more, 200 or more, 300 or more or 400 or more, and a level of significance (α-error-level) of e.g. 0.05 or smaller, e.g. 0.05, preferably 0.01 or smaller. A statistical value can be obtained for each gene and/or each position in the genome as well as for all antibiotics tested, a group of antibiotics or a single antibiotic. The obtained p-values can also be adapted for statistical errors, if needed.

[0094] For statistically sound results a multitude of individuals should be sampled, with n=50, 100, 200, 300 or 400, and a level of significance (α-error-level) of e.g. 0.05 or smaller, e.g. 0.05, preferably 0.01 or smaller. According to certain embodiments, particularly significant results can be obtained for n=200, 300 or 400.

[0095] For statistically sound results a multitude of individuals should be sampled, with n=50 or more, 100 or more, 200 or more, 300 or more or 400 or more, and a level of significance (α-error-level) of e.g. 0.05 or smaller, e.g. 0.05, preferably 0.01 or smaller. According to certain embodiments, particularly significant results can be obtained for n=200 or more, 300 or more or 400 or more.

[0096] After the above procedure has been carried out for more than 400, e.g. 438, individual species of Serratia, the data disclosed in Tables 1 and 2 were obtained for the statistically best correlations between gene mutations and antimicrobial drug, e.g. antibiotic, resistances. Thus, mutations in these genes were proven as valid markers for antimicrobial drug, e.g. antibiotic, resistance.

[0097] According to a further aspect, the present invention relates in a second aspect to a method of selecting a treatment of a patient suffering from an infection with a potentially resistant Serratia stain, e.g. from an antimicrobial drug, e.g. antibiotic, resistant Serratia infection, comprising the steps of:

a) obtaining or providing a sample containing or suspected of containing at least one Serratia species from the patient;
b) determining the presence of at least one mutation in at least two genes from the group of genes consisting of actP, SMWW4_v1c03050, amiD, SMWW4_v1c38520, selB, SMWW4_v1c13480, bglX, SMWW4_v1c14040, SMWW4_v1c13470, SMWW4_v1c38510, SMWW4_v1c07960, SMWW4_v1c19810, folX, SMWW4_v1c00800, SMWW4_v1c13910, SMWW4_v1c09360, ybiO, SMWW4_v1c25040, znuB, nrdH, lysR, SMWW4_v1c24620, SMWW4_v1c24800, SMWW4_v1c20760, rfaC, SMWW4_v1c21930, SMWW4_v1c12350, galT, alsK, SMWW4_v1c24810, girK, rihB, yhiN, alx, SMWW4_v1c44490, cnu, SMWW4_v1c30050, vasD, impL, SMWW4_v1c16540, SMWW4_v1c13350, yeaN, SMWW4_v1c40850, kdpA, dppB, ydaN, cysK, yceA, yhjK, and SMWW4_v1c25770, wherein the presence of said at least two mutations is indicative of a resistance to one or more antimicrobial, e.g. antibiotic, drugs;
c) identifying said at least one or more antimicrobial, e.g. antibiotic, drugs; and
d) selecting one or more antimicrobial, e.g. antibiotic, drugs different from the ones identified in step c) and being suitable for the treatment of a Serratia infection.

[0098] In this method, the steps a) of obtaining or providing a sample and b) of determining the presence of at least one mutation are as in the method of the first aspect.

[0099] The identification of the at least one or more antimicrobial, e.g. antibiotic, drug in step c) is then based on the results obtained in step b) and corresponds to the antimicrobial, e.g. antibiotic, drug(s) that correlate(s) with the mutations. Once these antimicrobial drugs, e.g. antibiotics, are ruled out, the remaining antimicrobial drugs, e.g. antibiotic drugs/antibiotics, can be selected in step d) as being suitable for treatment.

[0100] In the description, references to the first and second aspect also apply to the 14^{th}, 15^{th}, 16^{th} and 17^{th} embodiment, referring to the same genes, unless clear from the context that they don't apply.

[0101] According to certain embodiments, the antimicrobial drug, e.g. antibiotic, in the method of the first or second aspect, as well as in the other methods of the invention, is at least one selected from the group of β-lactams, β-lactam inhibitors, quinolines and derivatives thereof, aminoglycosides, polyketides, respectively tetracyclines, and folate synthesis inhibitors.

[0102] In the methods of the invention the resistance of Serratia to one or more antimicrobial, e.g. antibiotic, drugs can be determined according to certain embodiments.

[0103] According to certain embodiments of the first and/or second aspect of the invention the antimicrobial, e.g. antibiotic, drug is selected from lactam antibiotics and the presence of a mutation in the following genes is determined: SMWW4_v1c13480.

[0104] According to certain embodiments of the first and/or second aspect of the invention the antimicrobial, e.g. antibiotic, drug is selected from polyketide antibiotics, preferably tetracycline antibiotics, and the presence of a mutation in the following genes is determined: actP, SMWW4_v1c03050, amiD, SMWW4_v1c38520, selB, SMWW4_v1c13480, bglX, SMWW4_v1c14040, SMWW4_v1c13470, SMWW4_v1c38510, SMWW4_v1c07960, SMWW4_v1c19810, folX, SMWW4_v1c00800, SMWW4_v1c13910, SMWW4_v1c09360, ybiO, SMWW4_v1c25040, znuB, nrdH, lysR, SMWW4_v1c24620, SMWW4_v1c24800, SMWW4_v1c20760, rfaC, SMWW4_v1c21930, SMWW4_v1c12350, galT, alsK, SMWW4_v1c24810, glrK, rihB, yhiN, alx, SMWW4_v1c44490, cnu, SMWW4_v1c30050, vasD, impL, SMWW4_v1c16540, SMWW4_v1c13350, yeaN, SMWW4_v1c40850, kdpA, dppB, ydaN, cysK, yceA, yhjK, and/or SMWW4_v1c25770.

[0105] According to certain embodiments, the antimicrobial drug is an antibiotic/antibiotic drug.

[0106] According to certain embodiments of the first and/or second aspect of the invention, determining the nucleic acid sequence information or the presence of a mutation comprises determining the presence of a single nucleotide at a single position in a gene. Thus the invention comprises methods wherein the presence of a single nucleotide polymorphism or mutation at a single nucleotide position is detected.

[0107] According to certain embodiments, the antibiotic drug in the methods of the present invention is selected from the group consisting of Amoxicillin/K Clavulanate (AUG), Ampicillin (AM), Aztreonam (AZT), Cefazolin (CFZ), Cefepime (CPE), Cefotaxime (CFT), Ceftazidime (CAZ), Ceftriaxone (CAX), Cefuroxime (CRM), Cephalotin (CF), Ciprofloxacin (CP), Ertapenem (ETP), Gentamicin (GM), Imipenem (IMP), Levofloxacin (LVX), Meropenem (MER), Piperacillin/Tazobactam (P/T), Ampicillin/Sulbactam (A/S), Tetracycline (TE), Tobramycin (TO), and Trimethoprim/Sulfamethoxazole (T/S).

[0108] The inventors have surprisingly found that mutations in certain genes are indicative not only for a resistance to one single antimicrobial, e.g. antibiotic, drug, but to groups containing several drugs.

[0109] According to certain embodiments of the first and/or second aspect of the invention, the gene is from Table 1 or Table 2, the antibiotic drug is selected from lactam antibiotics and a mutation in at least one of the following genes is detected with regard to reference genome NC_020211: SMWW4_v1c13480. According to certain embodiments of the first and/or second aspect of the invention, the gene is from Table 1 or Table 2, the antibiotic drug is selected from polyketide, preferably tetracycline antibiotics and a mutation in at least one of the following genes is detected with regard to reference genome NC_020211: actP, SMWW4_v1c03050, amiD, SMWW4_v1c38520, selB, SMWW4_v1c13480, bglX, SMWW4_v1c14040, SMWW4_v1c13470, SMWW4_v1c38510, SMWW4_v1c07960, SMWW4_v1c19810, folX, SMWW4_v1c00800, SMWW4_v1c13910, SMWW4_v1c09360, ybiO, SMWW4_v1c25040, znuB, nrdH, lysR, SMWW4_v1c24620, SMWW4_v1c24800, SMWW4_v1c20760, rfaC, SMWW4_v1c21930, SMWW4_v1c12350, galT, alsK, SMWW4_v1c24810, glrK, rihB, yhiN, alx, SMWW4_v1c44490, cnu, SMWW4_v1c30050, vasD, impL, SMWW4_v1c16540, SMWW4_v1c13350, yeaN, SMWW4_v1c40850, kdpA, dppB, ydaN, cysK, yceA, yhjK, SMWW4_v1c25770.

[0110] For specific antimicrobial drugs, e.g. antibiotics, specific positions in the above genes can be determined where a high statistical significance is observed. The inventors found that, apart from the above genes indicative of a resistance against antibiotics, also single nucleotide polymorphisms (=SNP's) may have a high significance for the presence of a resistance against defined antibiotic drugs. The analysis of these polymorphisms on a nucleotide level may further improve and accelerate the determination of a drug resistance to antimicrobial drugs, e.g. antibiotics, in Serratia.

[0111] According to certain embodiments of the first and/or second aspect of the invention, the gene is from Table 1 or Table 2, the antibiotic drug is selected from lactam antibiotics and a mutation in at least one of the following nucleotide positions is detected with regard to reference genome NC_020211: 1489693.

[0112] According to certain embodiments of the first and/or second aspect of the invention, the gene is from Table 1 or Table 2, the antibiotic drug is selected from polyketide, preferably tetracycline antibiotics and a mutation in at least one of the following nucleotide positions is detected with regard to reference genome NC_020211: 342947, 352212, 1816830, 352221, 1817267, 4149382, 86770, 86742, 86744, 1489672, 1489673, 1489681, 1490996, 1545409, 1487651, 1489693, 4148368, 897774, 2154027, 2154042, 2154044, 3716584, 87742, 1532249, 4148381, 1049796, 1601495, 4148825, 2715811, 3025014, 4143093, 4284592, 2154037, 1489972, 2662382, 2687128, 2250726, 4148361, 5161374, 5161396, 2371667, 1371641, 1398352, 4339539, 2687789, 4057459, 2716368, 4712441, 5025276, 4636300, 4812879, 3231402, 3243004, 3244657, 3249370, 3249507, 2716411, 1814748, 1476885, 1049699, 4296135, 4419488, 1347521, 1347533, 156541, 2816076, 3844397, 2018803, 176654, 176722, 176784, 2796043, 2796045.

[0113] According to certain embodiments of the first and/or second aspect of the invention, the antibiotic drug is AM and a mutation in at least one of the following nucleotide positions is detected with regard to reference genome NC_020211: 1489693.

[0114] According to certain embodiments of the first and/or second aspect of the invention, the antibiotic drug is TE and a mutation in at least one of the following nucleotide positions is detected with regard to reference genome NC_020211: 342947, 352212, 1816830, 352221, 1817267, 4149382, 86770, 86742, 86744, 1489672, 1489673, 1489681, 1490996, 1545409, 1487651, 1489693, 4148368, 897774, 2154027, 2154042, 2154044, 3716584, 87742, 1532249, 4148381, 1049796, 1601495, 4148825, 2715811, 3025014, 4143093, 4284592, 2154037, 1489972, 2662382, 2687128, 2250726, 4148361, 5161374, 5161396, 2371667, 1371641, 1398352, 4339539, 2687789, 4057459, 2716368, 4712441, 5025276, 4636300, 4812879, 3231402, 3243004, 3244657, 3249370, 3249507, 2716411, 1814748, 1476885, 1049699, 4296135, 4419488, 1347521, 1347533, 156541, 2816076, 3844397, 2018803, 176654, 176722, 176784, 2796043, 2796045.

[0115] According to certain embodiments of the first and/or second aspect of the invention, the resistance of a bacterial microorganism belonging to the species Serratia against 1, 2, 3, 4, 5, 6, 7, 8, 9, 10, 11, 12, 13, 14, 15 or 16, 17, 18, 19, 20 or 21 antibiotic drugs is determined.

[0116] According to certain embodiments of the first and/or second aspect of the invention, a detected mutation is a mutation leading to an altered amino acid sequence in a polypeptide derived from a respective gene in which the detected mutation is located. According to this aspect, the detected mutation thus leads to a truncated version of the polypeptide (wherein a new stop codon is created by the mutation) or a mutated version of the polypeptide having an amino acid exchange at the respective position.

[0117] According to certain embodiments of the first and/or second aspect of the invention, determining the nucleic acid sequence information or the presence of a mutation comprises determining a partial sequence or an entire sequence of the at least two genes.

[0118] According to certain embodiments of the first and/or second aspect of the invention, determining the nucleic acid sequence information or the presence of a mutation comprises determining a partial or entire sequence of the genome of the Serratia species, wherein said partial or entire sequence of the genome comprises at least a partial sequence of said at least two genes.

[0119] According to certain embodiments of the first and/or second aspect of the invention, determining the nucleic acid sequence information or the presence of a mutation comprises using a next generation sequencing or high throughput sequencing method. According to preferred embodiments of the first and/or second aspect of the invention, a partial or entire genome sequence of the bacterial organism of Serratia species is determined by using a next generation sequencing or high throughput sequencing method.

[0120] In a further, third aspect, the present invention relates to a method of determining an antimicrobial drug, e.g. antibiotic, resistance profile for bacterial microorganisms of Serratia species, comprising:

obtaining or providing a first data set of gene sequences of a plurality of clinical isolates of Serratia species; providing a second data set of antimicrobial drug, e.g. antibiotic, resistance of the plurality of clinical isolates of Serratia species;
aligning the gene sequences of the first data set to at least one, preferably one, reference genome of Serratia, and/or assembling the gene sequence of the first data set, at least in part;
analyzing the gene sequences of the first data set for genetic variants to obtain a third data set of genetic variants;
correlating the third data set with the second data set and statistically analyzing the correlation; and
determining the genetic sites in the genome of Serratia associated with antimicrobial drug, e.g. antibiotic, resistance.

[0121] The different steps can be carried out as described with regard to the method of the first aspect of the present invention.

[0122] When referring to the second data set, wherein the second data set e.g. comprises, respectively is, a set of antimicrobial drug, e.g. antibiotic, resistances of a plurality of clinical isolates, this can, within the scope of the invention, also refer to a self-learning data base that, whenever a new sample is analyzed, can take this sample into the second data set and thus expand its data base. The second data set thus does not have to be static and can be expanded, either by external input or by incorporating new data due to self-learning. This is, however, not restricted to the third aspect of the invention, but applies to other aspects of the invention that refer to a second data set, which does not necessarily have to refer to antimicrobial drug resistance. The same applies, where applicable, to the first data set, e.g. in the third aspect.

[0123] According to certain embodiments, statistical analysis in the present methods is carried out using Fisher's test with p<10⁻⁶, preferably p<10⁻⁹, particularly p<10⁻¹⁰.

[0124] The method of the third aspect of the present invention, as well as related methods, e.g. according to the 7^{th} and 10^{th} aspect, can, according to certain embodiments, comprise correlating different genetic sites to each other, e.g. in at least two, three, four, five, six, seven, eight, nine or ten genes. This way even higher statistical significance can be achieved.

[0125] According to certain embodiments of the method of the third aspect and related methods—as above, the second data set is provided by culturing the clinical isolates of Serratia species on agar plates provided with antimicrobial drugs, e.g. antibiotics, at different concentrations and the second data is obtained by taking the minimal concentration of the plates that inhibits growth of the respective Serratia species.

[0126] According to certain embodiments of the method of the third aspect and related methods, the antibiotic is at least one selected from the group of β-lactams, β-lactam inhibitors, quinolines and derivatives thereof, aminoglycosides, tetracyclines, and folate synthesis inhibitors, preferably Amoxicillin/K Clavulanate, Ampicillin, Aztreonam, Cefazolin, Cefepime, Cefotaxime, Ceftazidime, Ceftriaxone, Cefuroxime, Cephalothin, Ciprofloxacin, Ertapenem, Gentamicin, Imipenem, Levofloxacin, Meropenem, Piperacillin/Tazobactam, Ampicillin/Sulbactam, Tetracycline, Tobramycin, and Trimethoprim/Sulfamethoxazole.

[0127] According to certain embodiments of the method of the third aspect and related methods, the gene sequences in the third data set are comprised in at least one gene from the group of genes consisting of actP, SMWW4_v1c03050, amiD, SMWW4_v1c38520, selB, SMWW4_v1c13480, bglX, SMWW4_v1c14040, SMWW4_v1c13470, SMWW4_v1c38510, SMWW4_v1c07960, SMWW4_v1c19810, folX, SMWW4_v1c00800, SMWW4_v1c13910, SMWW4_v1c09360, ybiO, SMWW4_v1c25040, znuB, nrdH, lysR, SMWW4_v1c24620, SMWW4_v1c24800, SMWW4_v1c20760, rfaC, SMWW4_v1c21930, SMWW4_v1c12350, galT, alsK, SMWW4_v1c24810, girK, rihB, yhiN, alx, SMWW4_v1c44490, cnu, SMWW4_v1c30050, SMWW4_v1c40850, kdpA, dppB, ydaN, cysK, yceA, yhjK, and SMWW4_v1c25770, or from the genes listed in Table 5.

[0128] According to certain embodiments of the method of the third aspect and related methods, the genetic variant has a point mutation, an insertion and or deletion of up to four bases, and/or a frameshift mutation.

[0129] A fourth aspect of the present invention relates to a method of determining an antimicrobial drug, e.g. antibiotic, resistance profile for a bacterial microorganism belonging to the species Serratia comprising the steps of

a) obtaining or providing a sample containing or suspected of containing the bacterial microorganism;
b) determining the presence of a mutation in at least one gene of the bacterial microorganism as determined by the method of the third aspect of the invention;
wherein the presence of a mutation is indicative of a resistance to an antimicrobial drug, e.g. antibiotic, drug.

[0130] Steps a) and b) can herein be carried out as described with regard to the first aspect, as well as for the following aspects of the invention.

[0131] With this method, any mutations in the genome of Serratia species correlated with antimicrobial drug, e.g. antibiotic, resistance can be determined and a thorough antimicrobial drug, e.g. antibiotic, resistance profile can be established.

[0132] A simple read out concept for a diagnostic test as described in this aspect is shown schematically in FIG. 1.

[0133] According to FIG. 1, a sample 1, e.g. blood from a patient, is used for molecular testing 2, e.g. using next generation sequencing (NGS), and then a molecular fingerprint 3 is taken, e.g. in case of NGS a sequence of selected genomic/plasmid regions or the whole genome is assembled. This is then compared to a reference library 4, i.e. selected sequences or the whole sequence are/is compared to one or more reference sequences, and mutations (SNPs, sequence-gene additions/deletions, etc.) are correlated with susceptibility/reference profile of reference strains in the reference library. The reference library 4 herein contains many genomes and is different from a reference genome. Then the result 5 is reported comprising ID (pathogen identification), i.e. a list of all (pathogenic) species identified in the sample, and AST (antimicrobial susceptibility testing), i.e. a list including a susceptibility/resistance profile for all species listed

[0134] A fifth aspect of the present invention relates to a diagnostic method of determining an infection of a patient with Serratia species potentially resistant to antimicrobial drug treatment, which also can be described as method of determining an antimicrobial drug, e.g. antibiotic, resistant Serratia infection in a patient, comprising the steps of:

a) obtaining or providing a sample containing or suspected of containing a bacterial microorganism belonging to the species Serratia from the patient;
b) determining the presence of at least one mutation in at least one gene of the bacterial microorganism belonging to the species Serratia as determined by the method of the third aspect of the present invention, wherein the presence of said at least one mutation is indicative of an antimicrobial drug, e.g. antibiotic, resistant Serratia infection in said patient.

[0135] Again, steps a) and b) can herein be carried out as described with regard to the first aspect of the present invention.

[0136] According to this aspect, a Serratia infection in a patient can be determined using sequencing methods as well as a resistance to antimicrobial drugs, e.g. antibiotics, of the Serratia species be determined in a short amount of time compared to the conventional methods.

[0137] In a sixth aspect the present invention relates to a method of selecting a treatment of a patient suffering from an infection with a potentially resistant Serratia strain, e.g. an antimicrobial drug, e.g. antibiotic, resistant Serratia infection, comprising the steps of:

a) obtaining or providing a sample containing or suspected of containing a bacterial microorganism belonging to the species Serratia from the patient;
b) determining the presence of at least one mutation in at least one gene of the bacterial microorganism belonging to the species Serratia as determined by the method of the third aspect of the invention, wherein the presence of said at least one mutation is indicative of a resistance to one or more antimicrobial, e.g. antibiotic, drugs;
c) identifying said at least one or more antimicrobial, e.g. antibiotic, drugs; and
d) selecting one or more antimicrobial, e.g. antibiotic, drugs different from the ones identified in step c) and being suitable for the treatment of a Serratia infection.

[0138] This method can be carried out similarly to the second aspect of the invention and enables a fast was to select a suitable treatment with antibiotics for any infection with an unknown Serratia species.

[0139] A seventh aspect of the present invention relates to a method of acquiring, respectively determining, an antimicrobial drug, e.g. antibiotic, resistance profile for a bacterial microorganisms of Serratia species, comprising:

obtaining or providing a first data set of gene sequences of a clinical isolate of Serratia species;
providing a second data set of antimicrobial drug, e.g. antibiotic, resistance of a plurality of clinical isolates of Serratia species;
aligning the gene sequences of the first data set to at least one, preferably one, reference genome of Serratia, and/or assembling the gene sequence of the first data set, at least in part;
analyzing the gene sequences of the first data set for genetis variants to obtain a third data set of genetic variants of the first data set;
correlating the third data set with the second data set and statistically analyzing the correlation; and
determining the genetic sites in the genome of Serratia of the first data set associated with antimicrobial drug, e.g. antibiotic, resistance.

[0140] With this method, antimicrobial drug, e.g. antibiotic, resistances in an unknown isolate of Serratia can be determined.

[0141] According to certain embodiments, the reference genome of Serratia is NC_020211 as annotated at the NCBI. According to certain embodiments, statistical analysis in the present methods is carried out using Fisher's test with p<10⁻⁶, preferably p<10⁻⁹, particularly p<10⁻¹⁰. Also, according to certain embodiments, the method further comprises correlating different genetic sites to each other, e.g. in at least two, three, four, five, six, seven, eight, nine or ten genes.

[0142] An eighth aspect of the present invention relates to a computer program product comprising computer executable instructions which, when executed, perform a method according to the third, fourth, fifth, sixth or seventh aspect of the present invention.

[0143] In certain embodiments the computer program product is one on which program commands or program codes of a computer program for executing said method are stored. According to certain embodiments the computer program product is a storage medium. The same applies to the computer program products of the aspects mentioned afterwards, i.e. the eleventh aspect of the present invention. As noted above, the computer program products of the present invention can be self-learning, e.g. with respect to the first and second data sets.

[0144] In order to obtain the best possible information from the highly complex genetic data and develop an optimum model for diagnostic and therapeutical uses as well as the methods of the present invention—which can be applied stably in clinical routine—a thorough in silico analysis can be necessary. The proposed principle is based on a combination of different approaches, e.g. alignment with at least one, preferably more reference genomes and/or assembly of the genome and correlation of mutations found in every sample, e.g. from each patient, with all references and drugs, e.g. antibiotics, and search for mutations which occur in several drug and several strains.

[0145] Using the above steps a list of mutations as well of genes is generated. These can be stored in databases and statistical models can be derived from the databases. The statistical models can be based on at least one or more mutations at least one or more genes. Statistical models that can be trained can be combined from mutations and genes. Examples of algorithms that can produce such models are association Rules, Support Vector Machines, Decision Trees, Decision Forests, Discriminant-Analysis, Cluster-Methods, and many more.

[0146] The goal of the training is to allow a reproducible, standardized application during routine procedures.

[0147] For this, for example, a genome or parts of the genome of a microorganism can be sequenced from a patient to be diagnosed. Afterwards, core characteristics can be derived from the sequence data which can be used to predict resistance. These are the points in the database used for the final model, i.e. at least one mutation or at least one gene, but also combinations of mutations, etc.

[0148] The corresponding characteristics can be used as input for the statistical model and thus enable a prognosis for new patients. Not only the information regarding all resistances of all microorganisms, e.g. of Serratia species, against all drugs, e.g. antibiotics, can be integrated in a computer decision support tool, but also corresponding directives (e.g. EUCAST) so that only treatment proposals are made that are in line with the directives.

[0149] A ninth aspect of the present invention relates to the use of the computer program product according to the eighth aspect for acquiring an antimicrobial drug, e.g. antibiotic, resistance profile for bacterial microorganisms of Serratia species or in a method of the third aspect of the invention.

[0150] In a tenth aspect a method of selecting a treatment of a patient having an infection with a bacterial microorganism of Serratia species, comprising:

obtaining or providing a first data set comprising a gene sequence of at least one clinical isolate of the microorganism from the patient;
providing a second data set of antimicrobial drug, e.g. antibiotic, resistance of a plurality of clinical isolates of the microorganism;
aligning the gene sequences of the first data set to at least one, preferably one, reference genome of the microorganism, and/or assembling the gene sequence of the first data set, at least in part;
analyzing the gene sequences of the first data set for genetic variants to obtain a third data set of genetic variants of the first data set;
correlating the third data set with the second data set of antimicrobial drug, e.g. antibiotic, resistance of a plurality of clinical isolates of the microorganism and statistically analyzing the correlation;
determining the genetic sites in the genome of the clinical isolate of the microorganism of the first data set associated with antimicrobial drug, e.g. antibiotic, resistance; and selecting a treatment of the patient with one or more antimicrobial, e.g. antibiotic, drugs different from the ones identified in the determination of the genetic sites associated with antimicrobial drug, e.g. antibiotic, resistance is disclosed.

[0151] Again, the steps can be carried out as similar steps before. In this method, as well as similar ones, no aligning is necessary, as the unknown sample can be directly correlated, after the genome or genome sequences are produced, with the second data set and thus mutations and antimicrobial drug, e.g. antibiotic, resistances can be determined. The first data set can be assembled, for example, using known techniques.

[0152] According to certain embodiments, statistical analysis in the present method is carried out using Fisher's test with p<10⁻⁶, preferably p<10⁻⁹, particularly p<10⁻¹⁰. Also, according to certain embodiments, the method further comprises correlating different genetic sites to each other.

[0153] An eleventh aspect of the present invention is directed to a computer program product comprising computer executable instructions which, when executed, perform a method according to the tenth aspect.

[0154] According to a twelfth aspect of the present invention, a diagnostic method of determining an infection of a patient with Serratia species potentially resistant to antimicrobial drug treatment, which can also be described as a method of determining an antimicrobial drug, e.g. antibiotic, resistant Serratia infection of a patient is disclosed, comprising the steps of:

a) obtaining or providing a sample containing or suspected of containing at least one Serratia species from the patient;
b) determining the presence of at least one mutation in at least two genes from the group of genes listed in Table 5, wherein the presence of said at least two mutations is indicative of an antimicrobial drug, e.g. antibiotic, resistant Serratia infection in said patient.

[0155] A thirteenth aspect of the invention discloses a method of selecting a treatment of a patient suffering from an antimicrobial drug, e.g. antibiotic, resistant Serratia infection, comprising the steps of:

a) obtaining or providing a sample containing or suspected of containing at least one Serratia species from the patient;
b) determining the presence of at least one mutation in at least two genes from the group of genes listed in Table 5, wherein the presence of said at least two mutations is indicative of a resistance to one or more antimicrobial, e.g. antibiotic, drugs;
c) identifying said at least one or more antimicrobial, e.g. antibiotic, drugs; and
d) selecting one or more antimicrobial, e.g. antibiotic, drugs different from the ones identified in step c) and being suitable for the treatment of a Serratia infection.

[0156] Again, the steps can be carried out as in similar methods before, e.g. as in the first and second aspect of the invention. In the twelfth and thirteenth aspect of the invention, all classes of antibiotics considered in the present method are covered.

[0157] Herein, the genes in Table 5 are the following: actP, alsK, alx, amiD, bglX, cnu, cysK, dppB, folX, galT, glrK, impL, kdpA, lysR, nrdH, rfaC, rihB, selB, SMWW4_v1c00800, SMWW4_v1c03050, SMWW4_v1c07960, SMWW4_v1c09360, SMWW4_v1c12350, SMWW4_v1c13350, SMWW4_v1c13470, SMWW4_v1c13480, SMWW4_v1c13910, SMWW4_v1c14040, SMWW4_v1c16540, SMWW4_v1c19810, SMWW4_v1c20760, SMWW4_v1c21930, SMWW4_v1c24620, SMWW4_v1c24800, SMWW4_v1c24810, SMWW4_v1c25040, SMWW4_v1c25770, SMWW4_v1c30050, SMWW4_v1c38510, SMWW4_v1c38520, SMWW4_v1c40850, SMWW4_v1c44490, vasD, ybiO, yceA, ydaN, yeaN, yhiN, yhjK, znuB, gyrA, csiE, mnmC, bioD, rlmG, SMWW4_v1c08980, SMWW4_v1c01000, SMWW4_v1c22750, SMWW4_v1c00940, recD, SMWW4_v1c09000, dhaR, rluC, SMWW4_v1c25060, SMWW4_v1c28700, nuoM, SMWW4_v1c31130, SMWW4_v1c11380, SMWW4_v1c21000, ybcJ, SMWW4_v1c01360, SMWW4_v1c24150, tmcA, SMWW4_v1c31090, yjjX, yafE, SMWW4_v1c42330, SMWW4_v1c34690, SMWW4_v1c06040.

TABLE 5
List of genes

| | | | |
|---|---|---|---|
| actP | alsK | alx | amiD |
| bglx | cnu | cysK | dppB |
| folX | galT | glrK | impL |
| kdpA | lysR | nrdH | rfaC |
| rihB | selB | SMWW4_v1c00800 | SMWW4_v1c03050 |
| SMWW4_v1c07960 | SMWW4_v1c09360 | SMWW4_v1c12350 | SMWW4_v1c13350 |
| SMWW4_v1c13470 | SMWW4_v1c13480 | SMWW4_v1c13910 | SMWW4_v1c14040 |
| SMWW4_v1c16540 | SMWW4_v1c19810 | SMWW4_v1c20760 | SMWW4_v1c21930 |
| SMWW4_v1c24620 | SMWW4_v1c24800 | SMWW4_v1c24810 | SMWW4_v1c25040 |
| SMWW4_v1c25770 | SMWW4_v1c30050 | SMWW4_v1c38510 | SMWW4_v1c38520 |
| SMWW4_v1c40850 | SMWW4_v1c44490 | vasD | ybiO |
| yceA | ydaN | yeaN | yhiN |
| yhjK | znuB | gyrA | csiE |
| mnmC | bioD | rlmG | SMWW4_v1c08980 |
| SMWW4_v1c01000 | SMWW4_v1c22750 | SMWW4_v1c00940 | recD |
| SMWW4_v1c09000 | dhaR | rluC | SMWW4_v1c25060 |
| SMWW4_v1c28700 | nuoM | SMWW4_v1c31130 | SMWW4_v1c11380 |
| SMWW4_v1c21000 | ybcJ | SMWW4_v1c01360 | SMWW4_v1c24150 |
| tmcA | SMWW4_v1c31090 | yjjx | yafE |
| SMWW4_v1c42330 | SMWW4_v1c34690 | SMWW4_v1c06040 | |

[0158] According to certain embodiments, mutations in at least two, three, four, five, six, seven, eight, nine or ten genes are determined in any of the methods of the present invention, e.g. in at least two genes or in at least three genes. Instead of testing only single genes or mutants, a combination of several variant positions can improve the prediction accuracy and further reduce false positive findings that are influenced by other factors. Therefore, it is in particular preferred to determine the presence of a mutation in 2, 3, 4, 5, 6, 7, 8 or 9 (or more) genes selected from Table 5.

[0159] Further, according to certain embodiments, the reference genome of Serratia is again NC_020211 as annotated at the NCBI. According to certain embodiments, statistical analysis in the present methods is carried out using Fisher's test with p<10⁻⁶, preferably p<10⁻⁹, particularly p<10⁻¹⁰. Also, according to certain embodiments, the method further comprises correlating different genetic sites to each other. Also the other aspects of the embodiments of the first and second aspect of the invention apply.

[0160] According to certain embodiments of the method of the twelfth and/or thirteenth aspect of the present invention, as well as also of the eighteenth aspect of the present invention, the antimicrobial drug is an antibiotic. According to certain embodiments, the antibiotic is a lactam antibiotic and a mutation in at least one of the genes listed in Table 6 is detected, or a mutation in at least one of the positions (denoted POS in the tables) listed in Table 6.

[0161] According to certain embodiments of the method of the twelfth and/or thirteenth aspect of the present invention, as well as also of the eighteenth aspect of the present invention, the antibiotic is CAX and a mutation in at least one of the genes of gyrA, csiE, mnmC, bioD, rlmG, SMWW4_v1c22750, recD is detected, or a mutation in at least one of the positions of U.S. Pat. Nos. 3,652,928, 4,037,047, 3,757,631, 1,423,417, 4,631,898, 2,454,764, 2,454,405, 4,253,544.

[0162] According to certain embodiments of the method of the twelfth and/or thirteenth aspect of the present invention, as well as also of the eighteenth aspect of the present invention, the antibiotic is AZT and a mutation in at least one of the genes of gyrA, csiE, mnmC is detected, or a mutation in at least one of the positions of U.S. Pat. Nos. 3,652,928, 4,037,047, 3,757,631.

TABLE 6
List for lactam antibiotics

| | | | p-value | genbank protein |
|---|---|---|---|---|
| gene name | POS | antibiotic | (FDR) | accession number |
| gyrA | 3652928 | T/S; CP; CAX; AZT; P/T; CPE; | 2.71641E−31 | YP_007407188.1 |
| | | CAZ; LVX | | |
| csiE | 4037047 | TE; CFT; CAX; AZT; P/T; CAZ | 4.08141E−15 | YP_007407543.1 |
| mnmC | 3757631 | CAZ; AZT; CFT; P/T; CAX | 2.47485E−12 | YP_007407285.1 |
| bioD | 1423417 | CFT; CPE; P/T; CAX | 6.87138E−13 | YP_007405106.1 |
| rlmG | 4631898 | TE; CFT; CPE; CAX | 1.89355E−16 | YP_007408080.1 |
| SMWW4_v1c08980 | 1008174 | IMP; MER; ETP | 9.88166E−13 | YP_007404721.1 |
| SMWW4_v1c01000 | 106274 | IMP; MER; ETP | 9.65084E−12 | YP_007403927.1 |
| SMWW4_v1c22750 | 2454764 | CFT; P/T; CAX | 2.25878E−11 | YP_007406095.1 |
| SMWW4_v1c00940 | 101412 | IMP; MER; ETP | 3.11418E−11 | YP_007403921.1 |
| SMWW4_v1c22750 | 2454405 | CFT; CPE; CAX | 3.15149E−11 | YP_007406095.1 |
| recD | 4253544 | CAZ; CFT; CAX | 7.84012E−11 | YP_007407740.1 |
| SMWW4_v1c09000 | 1009779 | IMP; MER; ETP | 2.08854E−10 | YP_007404723.1 |
| dhaR | 4554545 | A/S; TE; AM | 6.48952E−36 | YP_007408008.1 |
| rluC | 2047091 | A/S; TE; AM | 1.18283E−34 | YP_007405678.1 |
| SMWW4_v1c25060 | 2719311 | A/S; TE; AM | 1.08791E−31 | YP_007406322.1 |
| SMWW4_v1c25060 | 2719308 | A/S; TE; AM | 2.76029E−31 | YP_007406322.1 |
| SMWW4_v1c08620 | 971081 | A/S; TE; AM | 5.43808E−29 | YP_007404686.1 |

FDR: determined according to FDR (Benjamini Hochberg) method (Benjamini Hochberg, 1995)

[0163] According to certain embodiments of the method of the twelfth and/or thirteenth aspect of the present invention, as well as also of the eighteenth aspect of the present invention, the antibiotic is P/T and a mutation in at least one of the genes of gyrA, csiE, mnmC, bioD, SMWW4_v1c22750 is detected, or a mutation in at least one of the positions of U.S. Pat. Nos. 3,652,928, 4,037,047, 3,757,631, 1,423,417, 2,454,764.

[0164] According to certain embodiments of the method of the twelfth and/or thirteenth aspect of the present invention, as well as also of the eighteenth aspect of the present invention, the antibiotic is CPE and a mutation in at least one of the genes of gyrA, bioD, rlmG, SMWW4_v1c22750 is detected, or a mutation in at least one of the positions of U.S. Pat. Nos. 3,652,928, 1,423,417, 4,631,898, 2,454,405.

[0165] According to certain embodiments of the method of the twelfth and/or thirteenth aspect of the present invention, as well as also of the eighteenth aspect of the present invention, the antibiotic is CAZ and a mutation in at least one of the genes of gyrA, csiE, mnmC, recD is detected, or a mutation in at least one of the positions of U.S. Pat. Nos. 3,652,928, 4,037,047, 3,757,631, 4,253,544.

[0166] According to certain embodiments of the method of the twelfth and/or thirteenth aspect of the present invention, as well as also of the eighteenth aspect of the present invention, the antibiotic is CFT and a mutation in at least one of the genes of csiE, mnmC, bioD, rlmG, SMWW4_v1c22750, recD is detected, or a mutation in at least one of the positions of U.S. Pat. Nos. 4,037,047, 3,757,631, 1,423,417, 4,631,898, 2,454,764, 2,454,405, 4,253,544.

[0167] According to certain embodiments of the method of the twelfth and/or thirteenth aspect of the present invention, as well as also of the eighteenth aspect of the present invention, the antibiotic is at least one of IMP, MER and ETP and a mutation in at least one of the genes of SMWW4_v1c08980, SMWW4_v1c01000, SMWW4_v1c00940, SMWW4_v1c09000 is detected, or a mutation in at least one of the positions of 1008174, 106274, 101412, 1009779.

[0168] According to certain embodiments of the method of the twelfth and/or thirteenth aspect of the present invention, as well as also of the eighteenth aspect of the present invention, the antibiotic is at least one of A/S and AM and a mutation in at least one of the genes of dhaR, rluC, SMWW4_v1c25060, SMWW4_v1c08620 is detected, or a mutation in at least one of the positions of U.S. Pat. Nos. 4,554,545, 2,047,091, 2,719,311, 2,719,308, 971,081.

[0169] According to certain embodiments of the method of the twelfth and/or thirteenth aspect of the present invention, as well as also of the eighteenth aspect of the present invention, the antibiotic is a quinolone antibiotic and a mutation in at least one of the genes listed in Table 7 is detected, or a mutation in at least one of the positions (denoted POS in the tables) listed in Table 7.

TABLE 7
List for quinolone antibiotics

| | | | p-value | genbank protein |
|---|---|---|---|---|
| gene name | POS | antibiotic | (FDR) | accession number |
| gyrA | 3652928 | T/S; CP; CAX; AZT; | 2.71641E−31 | YP_007407188.1 |
| | | P/T; CPE; CAZ; LVX | | |
| SMWW4_v1c28700 | 3102771 | TE; LVX; CP | 1.66842E−20 | YP_007406684.1 |
| nuoM | 3684663 | TE; LVX; CP | 4.81035E−20 | YP_007407217.1 |
| SMWW4_v1c31130 | 3351244 | TE; LVX; CP | 6.93739E−15 | YP_007406926.1 |
| SMWW4_v1c11380 | 1267465 | TE; LVX; CP | 6.10558E−14 | YP_007404961.1 |
| SMWW4_v1c11380 | 1267467 | TE; LVX; CP | 6.10558E−14 | YP_007404961.1 |
| SMWW4_v1c21000 | 2274687 | CP; LVX | 2.13307E−13 | YP_007405920.1 |
| ybcJ | 1266246 | CP; LVX | 1.01082E−11 | YP_007404959.1 |
| SMWW4_v1c01360 | 143262 | TE; LVX | 7.6238E−30 | YP_007403963.1 |
| SMWW4_v1c24150 | 2608399 | TE; LVX | 2.11161E−26 | YP_007406233.1 |
| csiE | 4036990 | TE; LVX | 4.35341E−24 | YP_007407543.1 |
| tmcA | 3902870 | TE; LVX | 7.86789E−23 | YP_007407422.1 |
| SMWW4_v1c31090 | 3347837 | TE; LVX | 7.23732E−21 | YP_007406922.1 |
| yjjx | 742354 | TE; LVX | 4.59367E−18 | YP_007404495.1 |
| yafE | 1072696 | TE; LVX | 4.08141E−15 | YP_007404787.1 |
| SMWW4_v1c13160 | 1459283 | TE; LVX | 2.20905E−14 | YP_007405139.1 |

[0170] According to certain embodiments of the method of the twelfth and/or thirteenth aspect of the present invention, as well as also of the eighteenth aspect of the present invention, the antibiotic is at least one of CP and LVX and a mutation in at least one of the genes of gyrA, SMWW4_v1c28700, nuoM, SMWW4_v1c31130, SMWW4_v1c11380, SMWW4_v1c21000, ybcJ is detected, or a mutation in at least one of the positions of U.S. Pat. Nos. 3,652,928, 3,102,771, 3,684,663, 3,351,244, 1,267,465, 1,267,467, 2,274,687, 1,266,246.

[0171] According to certain embodiments of the method of the twelfth and/or thirteenth aspect of the present invention, as well as also of the eighteenth aspect of the present invention, the antibiotic is LVX and a mutation in at least one of the genes of SMWW4_v1c01360, SMWW4_v1c24150, csiE, tmcA, SMWW4_v1c31090, yjjX, yafE, SMWW4_v1c13160 is detected, or a mutation in at least one of the positions of 143262, 2608399, 4036990, 3902870, 3347837, 742354, 1072696, 1459283.

[0172] According to certain embodiments of the method of the twelfth and/or thirteenth aspect of the present invention, as well as also of the eighteenth aspect of the present invention, the antibiotic is an aminoglycoside antibiotic and a mutation in at least one of the genes listed in Table 8 is detected, or a mutation in at least one of the positions (denoted POS in the tables) listed in Table 8.

TABLE 8
List of aminoglycoside antibiotics

| | | | | genbank protein |
|---|---|---|---|---|
| gene name | POS | antibiotic | p-value (FDR) | accession number |
| SMWW4_v1c42330 | 4593940 | TO | 6.39209E−11 | YP_007408039.1 |

[0173] According to certain embodiments of the method of the twelfth and/or thirteenth aspect of the present invention, as well as also of the eighteenth aspect of the present invention, the antibiotic is TO and a mutation in SMWW4_v1c42330 is detected, or a mutation in position 4593940.

[0174] According to certain embodiments of the method of the twelfth and/or thirteenth aspect of the present invention, as well as also of the eighteenth aspect of the present invention, the antibiotic is an polyketide antibiotic and a mutation in at least one of the genes listed in Table 9 is detected, or a mutation in at least one of the positions (denoted POS in the tables) listed in Table 9.

TABLE 9
List of polyketides, preferably tetracycline

| | | | | genbank protein |
|---|---|---|---|---|
| gene name | POS | antibiotic | p-value (FDR) | accession number |
| actP | 342947 | TE | 7.35941E−48 | YP_007404126.1 |
| SMWW4_v1c03050 | 352212 | TE | 7.35941E−48 | YP_007404131.1 |
| amiD | 1816830 | TE | 7.35941E−48 | YP_007405479.1 |
| SMWW4_v1c03050 | 352221 | TE | 1.37918E−47 | YP_007404131.1 |
| amiD | 1817267 | TE | 1.80252E−47 | YP_007405479.1 |
| SMWW4_v1c38520 | 4149382 | TE | 1.80252E−47 | YP_007407658.1 |
| selB | 86770 | TE | 3.66497E−47 | YP_007403906.1 |
| selB | 86742 | TE | 3.70866E−47 | YP_007403906.1 |
| selB | 86744 | TE | 3.70866E−47 | YP_007403906.1 |
| SMWW4_v1c13480 | 1489672 | TE | 3.70866E−47 | YP_007405171.1 |
| SMWW4_v1c13480 | 1489673 | TE | 3.70866E−47 | YP_007405171.1 |
| SMWW4_v1c13480 | 1489681 | TE | 3.70866E−47 | YP_007405171.1 |
| bglX | 1490996 | TE | 3.70866E−47 | YP_007405172.1 |
| SMWW4_v1c14040 | 1545409 | TE | 3.70866E−47 | YP_007405227.1 |
| SMWW4_v1c13470 | 1487651 | TE | 1.23812E−46 | YP_007405170.1 |
| SMWW4_v1c13480 | 1489693 | TE; AM | 1.23812E−46 | YP_007405171.1 |
| SMWW4_v1c38510 | 4148368 | TE | 1.23812E−46 | YP_007407657.1 |
| SMWW4_v1c07960 | 897774 | TE | 1.70034E−46 | YP_007404622.1 |
| SMWW4_v1c19810 | 2154027 | TE | 1.70034E−46 | YP_007405801.1 |
| SMWW4_v1c19810 | 2154042 | TE | 1.70034E−46 | YP_007405801.1 |
| SMWW4_v1c19810 | 2154044 | TE | 1.70034E−46 | YP_007405801.1 |
| folX | 3716584 | TE | 1.76369E−46 | YP_007407245.1 |
| SMWW4_v1c00800 | 87742 | TE | 1.91346E−46 | YP_007403907.1 |
| SMWW4_v1c13910 | 1532249 | TE | 1.91346E−46 | YP_007405214.1 |
| actP | 342947 | TE | 7.35941E−48 | YP_007404126.1 |
| SMWW4_v1c03050 | 352212 | TE | 7.35941E−48 | YP_007404131.1 |

[0175] According to certain embodiments of the method of the twelfth and/or thirteenth aspect of the present invention, as well as also of the eighteenth aspect of the present invention, the antibiotic is TE and a mutation in at least one of the genes of actP, SMWW4_v1c03050, amiD, SMWW4_v1c38520, selB, SMWW4_v1c13480, bglX, SMWW4_v1c14040, SMWW4_v1c13470, SMWW4_v1c38510, SMWW4_v1c07960, SMWW4_v1c19810, folX, SMWW4_v1c00800, SMWW4_v1c13910 is detected, or a mutation in at least one of the positions of 342947, 352212, 1816830, 352221, 1817267, 4149382, 86770, 86742, 86744, 1489672, 1489673, 1489681, 1490996, 1545409, 1487651, 1489693, 4148368, 897774, 2154027, 2154042, 2154044, 3716584, 87742, 1532249.

[0176] According to certain embodiments of the method of the twelfth and/or thirteenth aspect of the present invention, as well as also of the eighteenth aspect of the present invention, the antibiotic is T/S and a mutation in at least one of the genes listed in Table 10 is detected, or a mutation in at least one of the positions (denoted POS in the tables) listed in Table 10.

TABLE 10
List of others antibiotics (benzene derived/
sulfonamide)

| | | | p-value | genbank protein |
|---|---|---|---|---|
| gene name | POS | antibiotic | (FDR) | accession number |
| gyrA | 3652928 | T/S; CP; CAX; AZT; | 2.71641E−31 | YP_007407188.1 |
| | | P/T; CPE; CAZ; LVX | | |
| SMWW4_v1c34690 | 3748106 | T/S; TE | 1.73209E−15 | YP_007407278.1 |
| SMWW4_v1c06040 | 679311 | T/S; TE | 5.14974E−14 | YP_007404430.1 |

[0177] A fourteenth aspect of the present invention is directed to a diagnostic method of determining an infection of a patient with Serratia species potentially resistant to antimicrobial drug treatment, which can also be described as method of determining an antimicrobial drug, e.g. antibiotic, resistant Serratia infection of a patient, comprising the steps of:

a) obtaining or providing a sample containing or suspected of containing at least one Serratia species from the patient;
b) determining the presence of at least one mutation in at least one gene from the group of genes consisting of actP, SMWW4_v1c03050, amiD, SMWW4_v1c38520, selB, SMWW4_v1c13480, bglX, SMWW4_v1c14040, SMWW4_v1c13470, SMWW4_v1c38510, SMWW4_v1c07960, SMWW4_v1c19810, folX, SMWW4_v1c00800, SMWW4_v1c13910, SMWW4_v1c09360, ybiO, SMWW4_v1c25040, znuB, nrdH, lysR, SMWW4_v1c24620, SMWW4_v1c24800, SMWW4_v1c20760, rfaC, SMWW4_v1c21930, SMWW4_v1c12350, galT, alsK, SMWW4_v1c24810, glrK, rihB, yhiN, alx, SMWW4_v1c44490, cnu, SMWW4_v1c30050, vasD, impL, SMWW4_v1c16540, SMWW4_v1c13350, yeaN, SMWW4_v1c40850, kdpA, dppB, ydaN, cysK, yceA, yhjK, and SMWW4_v1c25770, preferably SMWW4_v1c03050, amiD, SMWW4_v1c38520, selB, SMWW4_v1c13480, bglX, SMWW4_v1c14040, SMWW4_v1c13470, SMWW4_v1c38510, SMWW4_v1c07960, SMWW4_v1c19810, SMWW4_v1c00800, SMWW4_v1c13910, SMWW4_v1c09360, ybiO, SMWW4_v1c25040, nrdH, SMWW4_v1c24620, SMWW4_v1c24800, SMWW4_v1c20760, SMWW4_v1c21930, SMWW4_v1c12350, galT, alsK, SMWW4_v1c24810, girK, rihB, yhiN, alx, SMWW4_v1c44490, cnu, SMWW4_v1c30050, vasD, impL, SMWW4_v1c16540, SMWW4_v1c13350, yeaN, SMWW4_v1c40850, ydaN, yceA, yhjK, and SMWW4_v1c25770, wherein the presence of said at least one mutation is indicative of an antimicrobial drug, e.g. antibiotic, resistant Serratia infection in said patient.

[0178] A fifteenth aspect of the present invention is directed to a method of selecting a treatment of a patient suffering from an antimicrobial drug, e.g. antibiotic, resistant Serratia infection, comprising the steps of:

a) obtaining or providing a sample containing or suspected of containing at least one Serratia species from the patient;
b) determining the presence of at least one mutation in at least one gene from the group of genes consisting of actP, SMWW4_v1c03050, amiD, SMWW4_v1c38520, selB, SMWW4_v1c13480, bglX, SMWW4_v1c14040, SMWW4_v1c13470, SMWW4_v1c38510, SMWW4_v1c07960, SMWW4_v1c19810, folX, SMWW4_v1c00800, SMWW4_v1c13910, SMWW4_v1c09360, ybiO, SMWW4_v1c25040, znuB, nrdH, lysR, SMWW4_v1c24620, SMWW4_v1c24800, SMWW4_v1c20760, rfaC, SMWW4_v1c21930, SMWW4_v1c12350, galT, alsK, SMWW4_v1c24810, girK, rihB, yhiN, alx, SMWW4_v1c44490, cnu, SMWW4_v1c30050, vasD, impL, SMWW4_v1c16540, SMWW4_v1c13350, yeaN, SMWW4_v1c40850, kdpA, dppB, ydaN, cysK, yceA, yhjK, and SMWW4_v1c25770, preferably SMWW4_v1c03050, amiD, SMWW4_v1c38520, selB, SMWW4_v1c13480, bglX, SMWW4_v1c14040, SMWW4_v1c13470, SMWW4_v1c38510, SMWW4_v1c07960, SMWW4_v1c19810, SMWW4_v1c00800, SMWW4_v1c13910, SMWW4_v1c09360, ybiO, SMWW4_v1c25040, nrdH, SMWW4_v1c24620, SMWW4_v1c24800, SMWW4_v1c20760, SMWW4_v1c21930, SMWW4_v1c12350, galT, alsK, SMWW4_v1c24810, girK, rihB, yhiN, alx, SMWW4_v1c44490, cnu, SMWW4_v1c30050, vasD, impL, SMWW4_v1c16540, SMWW4_v1c13350, yeaN, SMWW4_v1c40850, ydaN, yceA, yhjK, and SMWW4_v1c25770, wherein the presence of said at least one mutation is indicative of a resistance to one or more antimicrobial, e.g. antibiotic, drugs;
c) identifying said at least one or more antimicrobial, e.g. antibiotic, drugs; and
d) selecting one or more antimicrobial, e.g. antibiotic, drugs different from the ones identified in step c) and being suitable for the treatment of a Serratia infection.

[0179] Again, in the fourteenth and the fifteenth aspect the steps correspond to those in the first or second aspect, although only a mutation in at least one gene is determined.

[0180] A sixteenth aspect of the present invention is directed to a method of treating a patient suffering from an antimicrobial drug, e.g. antibiotic, resistant Serratia infection, comprising the steps of:

a) obtaining or providing a sample containing or suspected of containing at least one Serratia species from the patient;
b) determining the presence of at least one mutation in at least one gene from the group of genes consisting of actP, SMWW4_v1c03050, amiD, SMWW4_v1c38520, selB, SMWW4_v1c13480, bglX, SMWW4_v1c14040, SMWW4_v1c13470, SMWW4_v1c38510, SMWW4_v1c07960, SMWW4_v1c19810, folX, SMWW4_v1c00800, SMWW4_v1c13910, SMWW4_v1c09360, ybiO, SMWW4_v1c25040, znuB, nrdH, lysR, SMWW4_v1c24620, SMWW4_v1c24800, SMWW4_v1c20760, rfaC, SMWW4_v1c21930, SMWW4_v1c12350, galT, alsK, SMWW4_v1c24810, glrK, rihB, yhiN, alx, SMWW4_v1c44490, cnu, SMWW4_v1c30050, vasD, impL, SMWW4_v1c16540, SMWW4_v1c13350, yeaN, SMWW4_v1c40850, kdpA, dppB, ydaN, cysK, yceA, yhjK, and SMWW4_v1c25770, preferably SMWW4_v1c03050, amiD, SMWW4_v1c38520, selB, SMWW4_v1c13480, bglX, SMWW4_v1c14040, SMWW4_v1c13470, SMWW4_v1c38510, SMWW4_v1c07960, SMWW4_v1c19810, SMWW4_v1c00800, SMWW4_v1c13910, SMWW4_v1c09360, ybiO, SMWW4_v1c25040, nrdH, SMWW4_v1c24620, SMWW4_v1c24800, SMWW4_v1c20760, SMWW4_v1c21930, SMWW4_v1c12350, galT, alsK, SMWW4_v1c24810, glrK, rihB, yhiN, alx, SMWW4_v1c44490, cnu, SMWW4_v1c30050, vasD, impL, SMWW4_v1c16540, SMWW4_v1c13350, yeaN, SMWW4_v1c40850, ydaN, yceA, yhjK, and SMWW4_v1c25770, wherein the presence of said at least one mutation is indicative of a resistance to one or more antimicrobial, e.g. antibiotic, drugs;
c) identifying said at least one or more antimicrobial, e.g. antibiotic, drugs;
d) selecting one or more antimicrobial, e.g. antibiotic, drugs different from the ones identified in step c) and being suitable for the treatment of a Serratia infection; and
e) treating the patient with said one or more antimicrobial, e.g. antibiotic, drugs.

[0181] A seventeenth aspect of the present invention is directed to a method of treating a patient suffering from an antimicrobial drug, e.g. antibiotic, resistant Serratia infection, comprising the steps of:

a) obtaining or providing a sample containing or suspected of containing at least one Serratia species from the patient;
b) determining the presence of at least one mutation in at least two genes from the group of genes consisting of actP, SMWW4_v1c03050, amiD, SMWW4_v1c38520, selB, SMWW4_v1c13480, bglX, SMWW4_v1c14040, SMWW4_v1c13470, SMWW4_v1c38510, SMWW4_v1c07960, SMWW4_v1c19810, folX, SMWW4_v1c00800, SMWW4_v1c13910, SMWW4_v1c09360, ybiO, SMWW4_v1c25040, znuB, nrdH, lysR, SMWW4_v1c24620, SMWW4_v1c24800, SMWW4_v1c20760, rfaC, SMWW4_v1c21930, SMWW4_v1c12350, galT, alsK, SMWW4_v1c24810, girK, rihB, yhiN, alx, SMWW4_v1c44490, cnu, SMWW4_v1c30050, vasD, impL, SMWW4_v1c16540, SMWW4_v1c13350, yeaN, SMWW4_v1c40850, kdpA, dppB, ydaN, cysK, yceA, yhjK, and SMWW4_v1c25770, wherein the presence of said at least two mutations is indicative of a resistance to one or more antimicrobial, e.g. antibiotic, drugs;
c) identifying said at least one or more antimicrobial, e.g. antibiotic, drugs;
d) selecting one or more antimicrobial, e.g. antibiotic, drugs different from the ones identified in step c) and being suitable for the treatment of a Serratia infection; and
e) treating the patient with said one or more antimicrobial, e.g. antibiotic, drugs.

[0182] An eighteenth aspect of the present invention is directed to a method of treating a patient suffering from an antimicrobial drug, e.g. antibiotic, resistant Serratia infection, comprising the steps of:

a) obtaining or providing a sample containing or suspected of containing at least one Serratia species from the patient;
b) determining the presence of at least one mutation in at least two genes from the group of genes listed in Table 5, wherein the presence of said at least two mutations is indicative of a resistance to one or more antimicrobial, e.g. antibiotic, drugs;
c) identifying said at least one or more antimicrobial, e.g. antibiotic, drugs;
d) selecting one or more antimicrobial, e.g. antibiotic, drugs different from the ones identified in step c) and being suitable for the treatment of a Serratia infection; and
e) treating the patient with said one or more antimicrobial, e.g. antibiotic, drugs.

[0183] A nineteenth aspect of the present invention is directed to a method of treating a patient suffering from an antimicrobial drug, e.g. antibiotic, resistant Serratia infection, comprising the steps of:

a) obtaining or providing a sample containing or suspected of containing at least one Serratia species from the patient;
b) determining the presence of at least one mutation in at least one gene from the group of genes listed in Table 11, preferably from the group of genes listed in Table 12, wherein the presence of said at least one mutation is indicative of a resistance to one or more antimicrobial, e.g. antibiotic, drugs;
c) identifying said at least one or more antimicrobial, e.g. antibiotic, drugs;
d) selecting one or more antimicrobial, e.g. antibiotic, drugs different from the ones identified in step c) and being suitable for the treatment of a Serratia infection; and
e) treating the patient with said one or more antimicrobial, e.g. antibiotic, drugs.

TABLE 11
List of genes

| | | | |
|---|---|---|---|
| actP | alsK | alx | amiD |
| bglX | cnu | cysK | dppB |
| folX | galT | glrK | impL |
| kdpA | lysR | nrdH | rfaC |
| rihB | selB | SMWW4_v1c00800 | SMWW4_v1c03050 |
| SMWW4_v1c07960 | SMWW4_v1c09360 | SMWW4_v1c12350 | SMWW4_v1c13350 |
| SMWW4_v1c13470 | SMWW4_v1c13480 | SMWW4_v1c13910 | SMWW4_v1c14040 |
| SMWW4_v1c16540 | SMWW4_v1c19810 | SMWW4_v1c20760 | SMWW4_v1c21930 |
| SMWW4_v1c24620 | SMWW4_v1c24800 | SMWW4_v1c24810 | SMWW4_v1c25040 |
| SMWW4_v1c25770 | SMWW4_v1c30050 | SMWW4_v1c38510 | SMWW4_v1c38520 |
| SMWW4_v1c40850 | SMWW4_v1c44490 | vasD | ybiO |
| yceA | ydaN | yeaN | yhiN |
| yhjK | znuB | SMWW4_v1c06040 | csiE |
| mnmC | bioD | rlmG | SMWW4_v1c08980 |
| SMWW4_v1c01000 | SMWW4_v1c22750 | SMWW4_v1c00940 | recD |
| SMWW4_v1c09000 | dhaR | rluC | SMWW4_v1c25060 |
| SMWW4_v1c28700 | nuoM | SMWW4_v1c31130 | SMWW4_v1c11380 |
| SMWW4_v1c21000 | ybcJ | SMWW4_v1c01360 | SMWW4_v1c24150 |
| tmcA | SMWW4_v1c31090 | yjjX | yafE |
| SMWW4_v1c42330 | SMWW4_v1c34690 | | |

[0184] Also in the sixteenth to nineteenth aspect of the invention, steps a) to d) are analogous to the steps in the method of the second aspect of the present invention. Step e) can be sufficiently carried out without being restricted and can be done e.g. non-invasively.

TABLE 12
List Of genes

| | | | |
|---|---|---|---|
| actP | alsK | alx | amiD |
| bglX | cnu | SMWW4_v1c06040 | SMWW4_v1c34690 |
| SMWW4_v1c42330 | galT | glrK | impL |
| yafE | SMWW4_v1c31090 | nrdH | tmcA |
| rihB | selB | SMWW4_v1c00800 | SMWW4_v1c03050 |
| SMWW4_v1c07960 | SMWW4_v1c09360 | SMWW4_v1c12350 | SMWW4_v1c13350 |
| SMWW4_v1c13470 | SMWW4_v1c13480 | SMWW4_v1c13910 | SMWW4_v1c14040 |
| SMWW4_v1c16540 | SMWW4_v1c19810 | SMWW4_v1c20760 | SMWW4_v1c21930 |
| SMWW4_v1c24620 | SMWW4_v1c24800 | SMWW4_v1c24810 | SMWW4_v1c25040 |
| SMWW4_v1c25770 | SMWW4_v1c30050 | SMWW4_v1c38510 | SMWW4_v1c38520 |
| SMWW4_v1c40850 | SMWW4_v1c44490 | vasD | ybiO |
| yceA | ydaN | yeaN | yhiN |
| yhjK | SMWW4_v1c24150 | SMWW4_v1c01360 | csiE |
| mnmC | bioD | rlmG | SMWW4_v1c08980 |
| SMWW4_v1c01000 | SMWW4_v1c22750 | SMWW4_v1c00940 | ybcJ |
| SMWW4_v1c09000 | dhaR | rluC | SMWW4_v1c25060 |
| SMWW4_v1c28700 | nuoM | SMWW4_v1c31130 | SMWW4_v1c11380 |
| SMWW4_v1c21000 | | | |

[0185] A twentieth aspect of the present invention is directed to a diagnostic method of determining an infection of a patient with Serratia species potentially resistant to antimicrobial drug treatment, which can also be described as method of determining an antimicrobial drug, e.g. antibiotic, resistant Serratia infection of a patient, comprising the steps of:

a) obtaining or providing a sample containing or suspected of containing at least one Serratia species from the patient;
b) determining the presence of at least one mutation in at least one gene from the group of genes listed in Table 11, preferably from the group of genes listed in Table 12, wherein the presence of said at least one mutation is indicative of an antimicrobial drug, e.g. antibiotic, resistant Serratia infection in said patient.

[0186] A twenty-first aspect of the present invention is directed to a method of selecting a treatment of a patient suffering from an antimicrobial drug, e.g. antibiotic, resistant Serratia infection, comprising the steps of:

a) obtaining or providing a sample containing or suspected of containing at least one Serratia species from the patient;
b) determining the presence of at least one mutation in at least one gene from the group of genes listed in Table 11, preferably from the group of genes listed in Table 12, wherein the presence of said at least one mutation is indicative of a resistance to one or more antimicrobial, e.g. antibiotic, drugs;
c) identifying said at least one or more antimicrobial, e.g. antibiotic, drugs; and
d) selecting one or more antimicrobial, e.g. antibiotic, drugs different from the ones identified in step c) and being suitable for the treatment of a Serratia infection.

[0187] Again, in the twentieth and the twenty-first aspect the steps correspond to those in the first or second aspect, although only a mutation in at least one gene is determined.

### EXAMPLES

[0188] The present invention will now be described in detail with reference to several examples thereof. However, these examples are illustrative and do not limit the scope of the invention.

### Example 1

[0189] Whole genome sequencing was carried out in addition to classical antimicrobial susceptibility testing of the same isolates for a cohort of 438 specimens. This allowed performing genome wide correlation studies to find genetic variants (e.g. point mutations, small insertions and deletion, larger structural variants, plasmid copy number gains, gene dosage effects) in the genome and plasmids that are significantly correlated to the resistance against one or several drugs. The approach also allows for comparing the relevant sites in the genome to each other.

[0190] In the approach the different sources of genetic resistance as well as the different ways of how bacteria can become resistant were covered. By measuring clinical isolates collected in a broad geographical area and across a broad time span of three decades a complete picture going far beyond the rather artificial step of laboratory generated resistance mechanisms was tried to be generated.

[0191] To this end, a set of 21 clinically relevant antimicrobial agents with 5 different modes of action was put together, and the minimally inhibitory concentration (MIC) of the 21 drugs for the Serratia isolates was measured.

[0192] The detailed procedure is given in the following:

### Bacterial Strains

[0193] The inventors selected 438 Serratia strains from the microbiology strain collection at Siemens Healthcare Diagnostics (West Sacramento, Calif.) for susceptibility testing and whole genome sequencing.

### Antimicrobial Susceptibility Testing (AST) Panels

[0194] Frozen reference AST panels were prepared following Clinical Laboratory Standards Institute (CLSI) recommendations. The following antimicrobial agents (with μg/ml concentrations shown in parentheses) were included in the panels: Amoxicillin/K Clavulanate (0.5/0.25-64/32), Ampicillin (0.25-128), Ampicillin/Sulbactam (0.5/0.25-64/32), Aztreonam (0.25-64), Cefazolin (0.5-32), Cefepime (0.25-64), Cefotaxime (0.25-128), Ceftazidime (0.25-64), Ceftriaxone (0.25-128), Cefuroxime (1-64), Cephalothin (1-64), Ciprofloxacin (0.015-8), Ertepenem (0.12-32), Gentamicin (0.12-32), Imipenem (0.25-32), Levofloxacin (0.25-16), Meropenem (0.12-32), Piperacillin/Tazobactam (0.25/4-256/4), Tetracycline (0.5-64), Tobramycin (0.12-32), and Trimethoprim/Sulfamethoxazole (0.25/4.7-32/608). Prior to use with clinical isolates, AST panels were tested with QC strains. AST panels were considered acceptable for testing with clinical isolates when the QC results met QC ranges described by CLSI16.

### Inoculum Preparation

[0195] Isolates were cultured on trypticase soy agar with 5% sheep blood (BBL, Cockeysville, Md.) and incubated in ambient air at 35±1° C. for 18-24 h. Isolated colonies (4-5 large colonies or 5-10 small colonies) were transferred to a 3 ml Sterile Inoculum Water (Siemens) and emulsified to a final turbidity of a 0.5 McFarland standard. 2 ml of this suspension was added to 25 ml Inoculum Water with Pluronic-F (Siemens). Using the Inoculator (Siemens) specific for frozen AST panels, 5 μl of the cell suspension was transferred to each well of the AST panel. The inoculated AST panels were incubated in ambient air at 35±1° C. for 16-20 h. Panel results were read visually, and minimal inhibitory concentrations (MIC) were determined.

### DNA Extraction

[0196] Four streaks of each Gram-negative bacterial isolate cultured on trypticase soy agar containing 5% sheep blood and cell suspensions were made in sterile 1.5 ml collection tubes containing 50 μl Nuclease-Free Water (AM9930, Life Technologies). Bacterial isolate samples were stored at −20° C. until nucleic acid extraction. The Tissue Preparation System (TPS) (096D0382-02_01_B, Siemens) and the VERSANT® Tissue Preparation Reagents (TPR) kit (10632404B, Siemens) were used to extract DNA from these bacterial isolates. Prior to extraction, the bacterial isolates were thawed at room temperature and were pelleted at 2000 G for 5 seconds. The DNA extraction protocol DNAext was used for complete total nucleic acid extraction of 48 isolate samples and eluates, 50 μl each, in 4 hours. The total nucleic acid eluates were then transferred into 96-Well qPCR Detection Plates (401341, Agilent Technologies) for RNase A digestion, DNA quantitation, and plate DNA concentration standardization processes. RNase A (AM2271, Life Technologies) which was diluted in nuclease-free water following manufacturer's instructions was added to 50 μl of the total nucleic acid eluate for a final working concentration of 20 μg/ml. Digestion enzyme and eluate mixture were incubated at 37° C. for 30 minutes using Siemens VERSANT® Amplification and Detection instrument. DNA from the RNase digested eluate was quantitated using the Quant-iT™ PicoGreen dsDNA Assay (P11496, Life Technologies) following the assay kit instruction, and fluorescence was determined on the Siemens VERSANT® Amplification and Detection instrument. Data analysis was performed using Microsoft® Excel 2007. 25 μl of the quantitated DNA eluates were transferred into a new 96-Well PCR plate for plate DNA concentration standardization prior to library preparation. Elution buffer from the TPR kit was used to adjust DNA concentration. The standardized DNA eluate plate was then stored at −80° C. until library preparation.

### Next Generation Sequencing

[0197] Prior to library preparation, quality control of isolated bacterial DNA was conducted using a Qubit 2.0 Fluorometer (Qubit dsDNA BR Assay Kit, Life Technologies) and an Agilent 2200 TapeStation (Genomic DNA ScreenTape, Agilent Technologies). NGS libraries were prepared in 96 well format using NexteraXT DNA Sample Preparation Kit and NexteraXT Index Kit for 96 Indexes (Illumina) according to the manufacturer's protocol. The resulting sequencing libraries were quantified in a qPCR-based approach using the KAPA SYBR FAST qPCR MasterMix Kit (Peqlab) on a ViiA 7 real time PCR system (Life Technologies). 96 samples were pooled per lane for paired-end sequencing (2×100 bp) on Illumina Hiseq2000 or Hiseq2500 sequencers using TruSeq PE Cluster v3 and TruSeq SBS v3 sequncing chemistry (Illumina). Basic sequencing quality parameters were determined using the FastQC quality control tool for high throughput sequence data (Babraham Bioinformatics Institute).

### Data Analysis

[0198] Raw paired-end sequencing data for the 438 Serratia samples were mapped against the Serratia reference (NC_020211) with BWA 0.6.1.20. The resulting SAM files were sorted, converted to BAM files, and PCR duplicates were marked using the Picard tools package 1.104 (http://picard.sourceforge.net/). The Genome Analysis Toolkit 3.1.1 (GATK)21 was used to call SNPs and indels for blocks of 200 Serratia samples (parameters: —ploidy 1-glm BOTH-stand_call_conf 30-stand_emit_conf 10). VCF files were combined into a single file and quality filtering for SNPs was carried out (QD<2.0∥FS>60.0∥MQ<40.0) and indels (QD<2.0∥FS>200.0). Detected variants were annotated with SnpEff22 to predict coding effects. For each annotated position, genotypes of all Serratia samples were considered. Serratia samples were split into two groups, low resistance group (having lower MIC concentration for the considered drug), and high resistance group (having higher MIC concentrations) with respect to a certain MIC concentration (breakpoint). To find the best breakpoint all thresholds were evaluated and p-values were computed with Fisher's exact test relying on a 2×2 contingency table (number of Serratia samples having the reference or variant genotype vs. number of samples belonging to the low and high resistance group). The best computed breakpoint was the threshold yielding the lowest p-value for a certain genomic position and drug. For further analyses positions with nonsynonymous alterations and p-value <10⁻¹⁰ were considered.

[0199] Since a potential reason for drug resistance is gene duplication, gene dose dependency was evaluated. For each sample the genomic coverage for each position was determined using BED Tools. Gene ranges were extracted from the reference assembly NC_020211.gff and the normalized median coverage per gene was calculated. To compare low- and high-resistance isolates the best area under the curve (AUC) value was computed. Groups of at least 20% of all samples having a median coverage larger than zero for that gene and containing more than 15 samples per group were considered in order to exclude artifacts and cases with AUC>0.75 were further evaluated.

[0200] To include data on the different ways how resistance mechanisms are acquired Serratia isolates collected over more than three decades were analyzed such that also horizontal gene transfer could potentially be discovered.

[0201] In detail, the following steps were carried out:

[0202] Serratia strains to be tested were seeded on agar plates and incubated under growth conditions for 24 hours. Then, colonies were picked and incubated in growth medium in the presence of a given antibiotic drug in dilution series under growth conditions for 16-20 hours. Bacterial growth was determined by observing turbidity.

[0203] Next mutations were searched that are highly correlated with the results of the phenotypic resistance test.

[0204] For sequencing, samples were prepared using a Nextera library preparation, followed by multiplexed sequencing using the Illuminat HiSeq 2500 system, paired end sequencing. Data were mapped with BWA (Li H. and Durbin R. (2010) Fast and accurate long-read alignment with Burrows-Wheeler Transform. Bioinformatics, Epub. [PMID: 20080505]) and SNP were called using samtools (Li H.*, Handsaker B.*, Wysoker A., Fennell T., Ruan J., Homer N., Marth G., Abecasis G., Durbin R. and 1000 Genome Project Data Processing Subgroup (2009) The Sequence alignment/map (SAM) format and SAMtools. Bioinformatics, 25, 2078-9. [PMID: 19505943]).

[0205] As reference genome, NC_020211 as annotated at the NCBI was determined as best suited.

[0206] The mutations were matched to the genes and the amino acid changes were calculated. Using different algorithms (SVM, homology modeling) mutations leading to amino acid changes with likely pathogenicity/resistance were calculated.

[0207] In total, whole genomes and plasmids of 438 different clinical isolates of Serratia species, particularly Serratia marcescens, were sequenced, and classical antimicrobial susceptibility testing (AST) against 21 therapy forms as described above was performed for all organisms. From the classical AST a table with 438 rows (isolates) and 21 columns (MIC values for 21 drugs) was obtained. Each table entry contained the MIC for the respective isolate and the respective drug. The genetic data were mapped to different reference genomes of Serratia that have been annotated at the NCBI (http://www.ncbi.nlm.nih.gov/), and the best reference was chosen as template for the alignment—NC_020211 as annotated at the NCBI. Additionally, assemblies were carried out and it was verified that the sequenced genomes fulfil all quality criteria to become reference genomes.

[0208] Next, genetic variants were evaluated. This approach resulted in a table with the genetic sites in columns and the same isolates in 438 rows. Each table entry contained the genetic determinant at the respective site (A, C, T, G, small insertions and deletions, . . . ) for the respective isolate.

[0209] In a next step different statistical tests were carried out
[0210] 1) For comparing resistance/susceptibility to genetic sites we calculated contingency tables and determined the significance using Fishers test
[0211] 2) For comparing different sites to each other the correlation between different genetic sites were calculated
[0212] 3) For detecting gene dosage effects, e.g. loss or gain of genes (in the genome or on plasmids) the coverage (i.e. how many read map to the current position) at each site for resistant and not resistant isolates was calculated.

[0213] From the data, first the 50 genes with the best p-value were chosen for the list of mutations as well as the list of correlated antibiotic resistance, representing Tables 1 and 2.

[0214] A full list of all genetic sites, drugs, drug classes, affected genes etc. is provided in Tables 3 and 4a, 4b and 4c, wherein Table 3 corresponds to Table 1 and represents the genes having the lowest p-values after determining mutations in the genes, and Table 4, respectively Tables 4a, 4b and 4c correspond to Table 2 and represent the genes having the lowest p-values after correlating the mutations with antibiotic resistance for the respective antibiotics.

[0215] In addition, the data with the best p-values for each antibiotic class with the most antibiotic drugs as well as each antibiotic, respectively, were evaluated, being disclosed in Tables 5-10.

[0216] In Tables 3-10 the columns are designated as follows: Gene name: affected gene;

POS: genomic position of the SNP/variant in the Serratia reference genome (see above);
p-value: significance value calculated using Fishers exact test (determined according to FDR (Benjamini Hochberg) method (Benjamini Hochberg, 1995));
genbank protein accession number: (NCBI) Accession number of the corresponding protein of the genes

[0217] Also the antibiotic/drug classes, the number of significant antibiotics correlated to the mutations (over all antibiotics or over certain classes), as well as the correlated antibiotics are denoted in the Tables.

TABLE 3
Detailed results for the genes in Example 1 (corresponding to Table 1)

| | | | | | genbank protein |
|---|---|---|---|---|---|
| POS | drug class | #drug classes | p-value | gene name | accession number |
| 342947 | polyketide (tetracycline) | 1 | 7.35941E−48 | actP | YP_007404126.1 |
| 352212 | polyketide (tetracycline) | 1 | 7.35941E−48 | SMWW4_v1c03050 | YP_007404131.1 |
| 1816830 | polyketide (tetracycline) | 1 | 7.35941E−48 | amiD | YP_007405479.1 |
| 352221 | polyketide (tetracycline) | 1 | 1.37918E−47 | SMWW4_v1c03050 | YP_007404131.1 |
| 1817267 | polyketide (tetracycline) | 1 | 1.80252E−47 | amiD | YP_007405479.1 |
| 4149382 | polyketide (tetracycline) | 1 | 1.80252E−47 | SMWW4_v1c38520 | YP_007407658.1 |
| 86770 | polyketide (tetracycline) | 1 | 3.66497E−47 | selB | YP_007403906.1 |
| 86742 | polyketide (tetracycline) | 1 | 3.70866E−47 | selB | YP_007403906.1 |
| 86744 | polyketide (tetracycline) | 1 | 3.70866E−47 | selB | YP_007403906.1 |
| 1489672 | polyketide (tetracycline) | 1 | 3.70866E−47 | SMWW4_v1c13480 | YP_007405171.1 |
| 1489673 | polyketide (tetracycline) | 1 | 3.70866E−47 | SMWW4_v1c13480 | YP_007405171.1 |
| 1489681 | polyketide (tetracycline) | 1 | 3.70866E−47 | SMWW4_v1c13480 | YP_007405171.1 |
| 1490996 | polyketide (tetracycline) | 1 | 3.70866E−47 | bglX | YP_007405172.1 |
| 1545409 | polyketide (tetracycline) | 1 | 3.70866E−47 | SMWW4_v1c14040 | YP_007405227.1 |
| 1487651 | polyketide (tetracycline) | 1 | 1.23812E−46 | SMWW4_v1c13470 | YP_007405170.1 |
| 1489693 | polyketide (tetracycline); | 2 | 1.23812E−46 | SMWW4_v1c13480 | YP_007405171.1 |
| | Lactams | | | | |
| 4148368 | polyketide (tetracycline) | 1 | 1.23812E−46 | SMWW4_v1c38510 | YP_007407657.1 |
| 897774 | polyketide (tetracycline) | 1 | 1.70034E−46 | SMWW4_v1c07960 | YP_007404622.1 |
| 2154027 | polyketide (tetracycline) | 1 | 1.70034E−46 | SMWW4_v1c19810 | YP_007405801.1 |
| 2154042 | polyketide (tetracycline) | 1 | 1.70034E−46 | SMWW4_v1c19810 | YP_007405801.1 |
| 2154044 | polyketide (tetracycline) | 1 | 1.70034E−46 | SMWW4_v1c19810 | YP_007405801.1 |
| 3716584 | polyketide (tetracycline) | 1 | 1.76369E−46 | folX | YP_007407245.1 |
| 87742 | polyketide (tetracycline) | 1 | 1.91346E−46 | SMWW4_v1c00800 | YP_007403907.1 |
| 1532249 | polyketide (tetracycline) | 1 | 1.91346E−46 | SMWW4_v1c13910 | YP_007405214.1 |
| 4148381 | polyketide (tetracycline) | 1 | 1.91346E−46 | SMWW4_v1c38510 | YP_007407657.1 |
| 1049796 | polyketide (tetracycline) | 1 | 2.81969E−46 | SMWW4_v1c09360 | YP_007404759.1 |
| 1601495 | polyketide (tetracycline) | 1 | 2.81969E−46 | ybiO | YP_007405284.1 |
| 4148825 | polyketide (tetracycline) | 1 | 2.91358E−46 | SMWW4_v1c38510 | YP_007407657.1 |
| 2715811 | polyketide (tetracycline) | 1 | 3.69091E−46 | SMWW4_v1c25040 | YP_007406320.1 |
| 3025014 | polyketide (tetracycline) | 1 | 4.2298E−46 | znuB | YP_007406603.1 |
| 4143093 | polyketide (tetracycline) | 1 | 4.2298E−46 | nrdH | YP_007407651.1 |
| 4284592 | polyketide (tetracycline) | 1 | 4.2298E−46 | lysR | YP_007407763.1 |
| 2154037 | polyketide (tetracycline) | 1 | 4.33782E−46 | SMWW4_v1c19810 | YP_007405801.1 |
| 1489972 | polyketide (tetracycline) | 1 | 5.73298E−46 | bglX | YP_007405172.1 |
| 2662382 | polyketide (tetracycline) | 1 | 5.84504E−46 | SMWW4_v1c24620 | YP_007406278.1 |
| 2687128 | polyketide (tetracycline) | 1 | 5.84504E−46 | SMWW4_v1c24800 | YP_007406296.1 |
| 2250726 | polyketide (tetracycline) | 1 | 6.98841E−46 | SMWW4_v1c20760 | YP_007405896.1 |
| 4148361 | polyketide (tetracycline) | 1 | 6.98841E−46 | SMWW4_v1c38510 | YP_007407657.1 |
| 5161374 | polyketide (tetracycline) | 1 | 7.35922E−46 | rfaC | YP_007408564.1 |
| 5161396 | polyketide (tetracycline) | 1 | 7.35922E−46 | rfaC | YP_007408564.1 |
| 2371667 | polyketide (tetracycline) | 1 | 8.11844E−46 | SMWW4_v1c21930 | YP_007406013.1 |
| 1371641 | polyketide (tetracycline) | 1 | 9.02953E−46 | SMWW4_v1c12350 | YP_007405058.1 |
| 1398352 | polyketide (tetracycline) | 1 | 9.02953E−46 | galT | YP_007405081.1 |
| 4339539 | polyketide (tetracycline) | 1 | 1.07097E−45 | alsK | YP_007407817.1 |
| 2687789 | polyketide (tetracycline) | 1 | 1.10597E−45 | SMWW4_v1c24810 | YP_007406297.1 |
| 4057459 | polyketide (tetracycline) | 1 | 1.40374E−45 | glrK | YP_007407560.1 |
| 2716368 | polyketide (tetracycline) | 1 | 1.45717E−45 | SMWW4_v1c25040 | YP_007406320.1 |
| 4712441 | polyketide (tetracycline) | 1 | 1.55547E−45 | rihB | YP_007408169.1 |
| 5025276 | polyketide (tetracycline) | 1 | 1.55547E−45 | yhiN | YP_007408451.1 |
| 4636300 | polyketide (tetracycline) | 1 | 2.05052E−45 | alx | YP_007408086.1 |
| 4812879 | polyketide (tetracycline) | 1 | 2.51465E−45 | SMWW4_v1c44490 | YP_007408255.1 |
| 3231402 | polyketide (tetracycline) | 1 | 2.83885E−45 | cnu | YP_007406808.1 |
| 3243004 | polyketide (tetracycline) | 1 | 2.83885E−45 | SMWW4_v1c30050 | YP_007406818.1 |
| 3244657 | polyketide (tetracycline) | 1 | 2.83885E−45 | vasD | YP_007406821.1 |
| 3249370 | polyketide (tetracycline) | 1 | 2.83885E−45 | impL | YP_007406824.1 |
| 3249507 | polyketide (tetracycline) | 1 | 2.83885E−45 | impL | YP_007406824.1 |
| 2716411 | polyketide (tetracycline) | 1 | 3.33452E−45 | SMWW4_v1c25040 | YP_007406320.1 |
| 1814748 | polyketide (tetracycline) | 1 | 3.63807E−45 | SMWW4_v1c16540 | YP_007405477.1 |
| 1476885 | polyketide (tetracycline) | 1 | 3.76125E−45 | SMWW4_v1c13350 | YP_007405158.1 |
| 1049699 | polyketide (tetracycline) | 1 | 4.1218E−45 | SMWW4_v1c09360 | YP_007404759.1 |
| 4296135 | polyketide (tetracycline) | 1 | 4.1218E−45 | yeaN | YP_007407775.1 |
| 4419488 | polyketide (tetracycline) | 1 | 4.1218E−45 | SMWW4_v1c40850 | YP_007407891.1 |
| 1347521 | polyketide (tetracycline) | 1 | 4.55375E−45 | kdpA | YP_007405036.1 |
| 1347533 | polyketide (tetracycline) | 1 | 4.55375E−45 | kdpA | YP_007405036.1 |
| 156541 | polyketide (tetracycline) | 1 | 4.59793E−45 | dppB | YP_007403975.1 |
| 2816076 | polyketide (tetracycline) | 1 | 4.59793E−45 | ydaN | YP_007406409.1 |
| 3844397 | polyketide (tetracycline) | 1 | 4.59793E−45 | cysK | YP_007407367.1 |
| 2018803 | polyketide (tetracycline) | 1 | 5.6407E−45 | yceA | YP_007405655.1 |
| 176654 | polyketide (tetracycline) | 1 | 5.88767E−45 | yhjK | YP_007403988.1 |
| 176722 | polyketide (tetracycline) | 1 | 5.88767E−45 | yhjK | YP_007403988.1 |
| 176784 | polyketide (tetracycline) | 1 | 5.88767E−45 | yhjK | YP_007403988.1 |
| 2796043 | polyketide (tetracycline) | 1 | 5.88767E−45 | SMWW4_v1c25770 | YP_007406393.1 |
| 2796045 | polyketide (tetracycline) | 1 | 5.88767E−45 | SMWW4_v1c25770 | YP_007406393.1 |

TABLE 4a
Detailed results for the genes in Example 1 (corresponding to Table 2)

| | | | | #drug |
|---|---|---|---|---|
| POS | drug | #drugs | drug class | classes |
| 342947 | TE | 1 | polyketide (tetracycline) | 1 |
| 352212 | TE | 1 | polyketide (tetracycline) | 1 |
| 1816830 | TE | 1 | polyketide (tetracycline) | 1 |
| 352221 | TE | 1 | polyketide (tetracycline) | 1 |
| 1817267 | TE | 1 | polyketide (tetracycline) | 1 |
| 4149382 | TE | 1 | polyketide (tetracycline) | 1 |
| 86770 | TE | 1 | polyketide (tetracycline) | 1 |
| 86742 | TE | 1 | polyketide (tetracycline) | 1 |
| 86744 | TE | 1 | polyketide (tetracycline) | 1 |
| 1489672 | TE | 1 | polyketide (tetracycline) | 1 |
| 1489673 | TE | 1 | polyketide (tetracycline) | 1 |
| 1489681 | TE | 1 | polyketide (tetracycline) | 1 |
| 1490996 | TE | 1 | polyketide (tetracycline) | 1 |
| 1545409 | TE | 1 | polyketide (tetracycline) | 1 |
| 1487651 | TE | 1 | polyketide (tetracycline) | 1 |
| 1489693 | TE; | 2 | polyketide (tetracycline); Lactams | 2 |
| | AM | | | |
| 4148368 | TE | 1 | polyketide (tetracycline) | 1 |
| 897774 | TE | 1 | polyketide (tetracycline) | 1 |
| 2154027 | TE | 1 | polyketide (tetracycline) | 1 |
| 2154042 | TE | 1 | polyketide (tetracycline) | 1 |
| 2154044 | TE | 1 | polyketide (tetracycline) | 1 |
| 3716584 | TE | 1 | polyketide (tetracycline) | 1 |
| 87742 | TE | 1 | polyketide (tetracycline) | 1 |
| 1532249 | TE | 1 | polyketide (tetracycline) | 1 |
| 4148381 | TE | 1 | polyketide (tetracycline) | 1 |
| 1049796 | TE | 1 | polyketide (tetracycline) | 1 |
| 1601495 | TE | 1 | polyketide (tetracycline) | 1 |
| 4148825 | TE | 1 | polyketide (tetracycline) | 1 |
| 2715811 | TE | 1 | polyketide (tetracycline) | 1 |
| 3025014 | TE | 1 | polyketide (tetracycline) | 1 |
| 4143093 | TE | 1 | polyketide (tetracycline) | 1 |
| 4284592 | TE | 1 | polyketide (tetracycline) | 1 |
| 2154037 | TE | 1 | polyketide (tetracycline) | 1 |
| 1489972 | TE | 1 | polyketide (tetracycline) | 1 |
| 2662382 | TE | 1 | polyketide (tetracycline) | 1 |
| 2687128 | TE | 1 | polyketide (tetracycline) | 1 |
| 2250726 | TE | 1 | polyketide (tetracycline) | 1 |
| 4148361 | TE | 1 | polyketide (tetracycline) | 1 |
| 5161374 | TE | 1 | polyketide (tetracycline) | 1 |
| 5161396 | TE | 1 | polyketide (tetracycline) | 1 |
| 2371667 | TE | 1 | polyketide (tetracycline) | 1 |
| 1371641 | TE | 1 | polyketide (tetracycline) | 1 |
| 1398352 | TE | 1 | polyketide (tetracycline) | 1 |
| 4339539 | TE | 1 | polyketide (tetracycline) | 1 |
| 2687789 | TE | 1 | polyketide (tetracycline) | 1 |
| 4057459 | TE | 1 | polyketide (tetracycline) | 1 |
| 2716368 | TE | 1 | polyketide (tetracycline) | 1 |
| 4712441 | TE | 1 | polyketide (tetracycline) | 1 |
| 5025276 | TE | 1 | polyketide (tetracycline) | 1 |
| 4636300 | TE | 1 | polyketide (tetracycline) | 1 |
| 4812879 | TE | 1 | polyketide (tetracycline) | 1 |
| 3231402 | TE | 1 | polyketide (tetracycline) | 1 |
| 3243004 | TE | 1 | polyketide (tetracycline) | 1 |
| 3244657 | TE | 1 | polyketide (tetracycline) | 1 |
| 3249370 | TE | 1 | polyketide (tetracycline) | 1 |
| 3249507 | TE | 1 | polyketide (tetracycline) | 1 |
| 2716411 | TE | 1 | polyketide (tetracycline) | 1 |
| 1814748 | TE | 1 | polyketide (tetracycline) | 1 |
| 1476885 | TE | 1 | polyketide (tetracycline) | 1 |
| 1049699 | TE | 1 | polyketide (tetracycline) | 1 |
| 4296135 | TE | 1 | polyketide (tetracycline) | 1 |
| 4419488 | TE | 1 | polyketide (tetracycline) | 1 |
| 1347521 | TE | 1 | polyketide (tetracycline) | 1 |
| 1347533 | TE | 1 | polyketide (tetracycline) | 1 |
| 156541 | TE | 1 | polyketide (tetracycline) | 1 |
| 2816076 | TE | 1 | polyketide (tetracycline) | 1 |
| 3844397 | TE | 1 | polyketide (tetracycline) | 1 |
| 2018803 | TE | 1 | polyketide (tetracycline) | 1 |
| 176654 | TE | 1 | polyketide (tetracycline) | 1 |
| 176722 | TE | 1 | polyketide (tetracycline) | 1 |
| 176784 | TE | 1 | polyketide (tetracycline) | 1 |
| 2796043 | TE | 1 | polyketide (tetracycline) | 1 |
| 2796045 | TE | 1 | polyketide (tetracycline) | 1 |

TABLE 4b
Detailed results for the genes in Example 1 (corresponding to Table 2, continued)

| | | | | | #significant | #significant |
|---|---|---|---|---|---|---|
| | best | #significant | #significant | #significant | polyketide | other (benzene |
| POS | drug | Lactams | fluoroquinolones | aminoglycosides | (tetracycline) | derived)/sulfonamide |
| 342947 | TE | 0 | 0 | 0 | 1 | 0 |
| 352212 | TE | 0 | 0 | 0 | 1 | 0 |
| 1816830 | TE | 0 | 0 | 0 | 1 | 0 |
| 352221 | TE | 0 | 0 | 0 | 1 | 0 |
| 1817267 | TE | 0 | 0 | 0 | 1 | 0 |
| 4149382 | TE | 0 | 0 | 0 | 1 | 0 |
| 86770 | TE | 0 | 0 | 0 | 1 | 0 |
| 86742 | TE | 0 | 0 | 0 | 1 | 0 |
| 86744 | TE | 0 | 0 | 0 | 1 | 0 |
| 1489672 | TE | 0 | 0 | 0 | 1 | 0 |
| 1489673 | TE | 0 | 0 | 0 | 1 | 0 |
| 1489681 | TE | 0 | 0 | 0 | 1 | 0 |
| 1490996 | TE | 0 | 0 | 0 | 1 | 0 |
| 1545409 | TE | 0 | 0 | 0 | 1 | 0 |
| 1487651 | TE | 0 | 0 | 0 | 1 | 0 |
| 1489693 | TE | 1 | 0 | 0 | 1 | 0 |
| 4148368 | TE | 0 | 0 | 0 | 1 | 0 |
| 897774 | TE | 0 | 0 | 0 | 1 | 0 |
| 2154027 | TE | 0 | 0 | 0 | 1 | 0 |
| 2154042 | TE | 0 | 0 | 0 | 1 | 0 |
| 2154044 | TE | 0 | 0 | 0 | 1 | 0 |
| 3716584 | TE | 0 | 0 | 0 | 1 | 0 |
| 87742 | TE | 0 | 0 | 0 | 1 | 0 |
| 1532249 | TE | 0 | 0 | 0 | 1 | 0 |
| 4148381 | TE | 0 | 0 | 0 | 1 | 0 |
| 1049796 | TE | 0 | 0 | 0 | 1 | 0 |
| 1601495 | TE | 0 | 0 | 0 | 1 | 0 |
| 4148825 | TE | 0 | 0 | 0 | 1 | 0 |
| 2715811 | TE | 0 | 0 | 0 | 1 | 0 |
| 3025014 | TE | 0 | 0 | 0 | 1 | 0 |
| 4143093 | TE | 0 | 0 | 0 | 1 | 0 |
| 4284592 | TE | 0 | 0 | 0 | 1 | 0 |
| 2154037 | TE | 0 | 0 | 0 | 1 | 0 |
| 1489972 | TE | 0 | 0 | 0 | 1 | 0 |
| 2662382 | TE | 0 | 0 | 0 | 1 | 0 |
| 2687128 | TE | 0 | 0 | 0 | 1 | 0 |
| 2250726 | TE | 0 | 0 | 0 | 1 | 0 |
| 4148361 | TE | 0 | 0 | 0 | 1 | 0 |
| 5161374 | TE | 0 | 0 | 0 | 1 | 0 |
| 5161396 | TE | 0 | 0 | 0 | 1 | 0 |
| 2371667 | TE | 0 | 0 | 0 | 1 | 0 |
| 1371641 | TE | 0 | 0 | 0 | 1 | 0 |
| 1398352 | TE | 0 | 0 | 0 | 1 | 0 |
| 4339539 | TE | 0 | 0 | 0 | 1 | 0 |
| 2687789 | TE | 0 | 0 | 0 | 1 | 0 |
| 4057459 | TE | 0 | 0 | 0 | 1 | 0 |
| 2716368 | TE | 0 | 0 | 0 | 1 | 0 |
| 4712441 | TE | 0 | 0 | 0 | 1 | 0 |
| 5025276 | TE | 0 | 0 | 0 | 1 | 0 |
| 4636300 | TE | 0 | 0 | 0 | 1 | 0 |
| 4812879 | TE | 0 | 0 | 0 | 1 | 0 |
| 3231402 | TE | 0 | 0 | 0 | 1 | 0 |
| 3243004 | TE | 0 | 0 | 0 | 1 | 0 |
| 3244657 | TE | 0 | 0 | 0 | 1 | 0 |
| 3249370 | TE | 0 | 0 | 0 | 1 | 0 |
| 3249507 | TE | 0 | 0 | 0 | 1 | 0 |
| 2716411 | TE | 0 | 0 | 0 | 1 | 0 |
| 1814748 | TE | 0 | 0 | 0 | 1 | 0 |
| 1476885 | TE | 0 | 0 | 0 | 1 | 0 |
| 1049699 | TE | 0 | 0 | 0 | 1 | 0 |
| 4296135 | TE | 0 | 0 | 0 | 1 | 0 |
| 4419488 | TE | 0 | 0 | 0 | 1 | 0 |
| 1347521 | TE | 0 | 0 | 0 | 1 | 0 |
| 1347533 | TE | 0 | 0 | 0 | 1 | 0 |
| 156541 | TE | 0 | 0 | 0 | 1 | 0 |
| 2816076 | TE | 0 | 0 | 0 | 1 | 0 |
| 3844397 | TE | 0 | 0 | 0 | 1 | 0 |
| 2018803 | TE | 0 | 0 | 0 | 1 | 0 |
| 176654 | TE | 0 | 0 | 0 | 1 | 0 |
| 176722 | TE | 0 | 0 | 0 | 1 | 0 |
| 176784 | TE | 0 | 0 | 0 | 1 | 0 |
| 2796043 | TE | 0 | 0 | 0 | 1 | 0 |
| 2796045 | TE | 0 | 0 | 0 | 1 | 0 |

TABLE 4c
Detailed results for the genes in Example 1
(corresponding to Table 2, continued)

| | | | genbank protein |
|---|---|---|---|
| POS | p-value | gene name | accession number |
| 342947 | 7.35941E−48 | actP | YP_007404126.1 |
| 352212 | 7.35941E−48 | SMWW4_v1c03050 | YP_007404131.1 |
| 1816830 | 7.35941E−48 | amiD | YP_007405479.1 |
| 352221 | 1.37918E−47 | SMWW4_v1c03050 | YP_007404131.1 |
| 1817267 | 1.80252E−47 | amiD | YP_007405479.1 |
| 4149382 | 1.80252E−47 | SMWW4_v1c38520 | YP_007407658.1 |
| 86770 | 3.66497E−47 | selB | YP_007403906.1 |
| 86742 | 3.70866E−47 | selB | YP_007403906.1 |
| 86744 | 3.70866E−47 | selB | YP_007403906.1 |
| 1489672 | 3.70866E−47 | SMWW4_v1c13480 | YP_007405171.1 |
| 1489673 | 3.70866E−47 | SMWW4_v1c13480 | YP_007405171.1 |
| 1489681 | 3.70866E−47 | SMWW4_v1c13480 | YP_007405171.1 |
| 1490996 | 3.70866E−47 | bglX | YP_007405172.1 |
| 1545409 | 3.70866E−47 | SMWW4_v1c14040 | YP_007405227.1 |
| 1487651 | 1.23812E−46 | SMWW4_v1c13470 | YP_007405170.1 |
| 1489693 | 1.23812E−46 | SMWW4_v1c13480 | YP_007405171.1 |
| 4148368 | 1.23812E−46 | SMWW4_v1c38510 | YP_007407657.1 |
| 897774 | 1.70034E−46 | SMWW4_v1c07960 | YP_007404622.1 |
| 2154027 | 1.70034E−46 | SMWW4_v1c19810 | YP_007405801.1 |
| 2154042 | 1.70034E−46 | SMWW4_v1c19810 | YP_007405801.1 |
| 2154044 | 1.70034E−46 | SMWW4_v1c19810 | YP_007405801.1 |
| 3716584 | 1.76369E−46 | folX | YP_007407245.1 |
| 87742 | 1.91346E−46 | SMWW4_v1c00800 | YP_007403907.1 |
| 1532249 | 1.91346E−46 | SMWW4_v1c13910 | YP_007405214.1 |
| 4148381 | 1.91346E−46 | SMWW4_v1c38510 | YP_007407657.1 |
| 1049796 | 2.81969E−46 | SMWW4_v1c09360 | YP_007404759.1 |
| 1601495 | 2.81969E−46 | ybiO | YP_007405284.1 |
| 4148825 | 2.91358E−46 | SMWW4_v1c38510 | YP_007407657.1 |
| 2715811 | 3.69091E−46 | SMWW4_v1c25040 | YP_007406320.1 |
| 3025014 | 4.2298E−46 | znuB | YP_007406603.1 |
| 4143093 | 4.2298E−46 | nrdH | YP_007407651.1 |
| 4284592 | 4.2298E−46 | lysR | YP_007407763.1 |
| 2154037 | 4.33782E−46 | SMWW4_v1c19810 | YP_007405801.1 |
| 1489972 | 5.73298E−46 | bglX | YP_007405172.1 |
| 2662382 | 5.84504E−46 | SMWW4_v1c24620 | YP_007406278.1 |
| 2687128 | 5.84504E−46 | SMWW4_v1c24800 | YP_007406296.1 |
| 2250726 | 6.98841E−46 | SMWW4_v1c20760 | YP_007405896.1 |
| 4148361 | 6.98841E−46 | SMWW4_v1c38510 | YP_007407657.1 |
| 5161374 | 7.35922E−46 | rfaC | YP_007408564.1 |
| 5161396 | 7.35922E−46 | rfaC | YP_007408564.1 |
| 2371667 | 8.11844E−46 | SMWW4_v1c21930 | YP_007406013.1 |
| 1371641 | 9.02953E−46 | SMWW4_v1c12350 | YP_007405058.1 |
| 1398352 | 9.02953E−46 | galT | YP_007405081.1 |
| 4339539 | 1.07097E−45 | alsK | YP_007407817.1 |
| 2687789 | 1.10597E−45 | SMWW4_v1c24810 | YP_007406297.1 |
| 4057459 | 1.40374E−45 | glrK | YP_007407560.1 |
| 2716368 | 1.45717E−45 | SMWW4_v1c25040 | YP_007406320.1 |
| 4712441 | 1.55547E−45 | rihB | YP_007408169.1 |
| 5025276 | 1.55547E−45 | yhiN | YP_007408451.1 |
| 4636300 | 2.05052E−45 | alx | YP_007408086.1 |
| 4812879 | 2.51465E−45 | SMWW4_v1c44490 | YP_007408255.1 |
| 3231402 | 2.83885E−45 | cnu | YP_007406808.1 |
| 3243004 | 2.83885E−45 | SMWW4_v1c30050 | YP_007406818.1 |
| 3244657 | 2.83885E−45 | vasD | YP_007406821.1 |
| 3249370 | 2.83885E−45 | impL | YP_007406824.1 |
| 3249507 | 2.83885E−45 | impL | YP_007406824.1 |
| 2716411 | 3.33452E−45 | SMWW4_v1c25040 | YP_007406320.1 |
| 1814748 | 3.63807E−45 | SMWW4_v1c16540 | YP_007405477.1 |
| 1476885 | 3.76125E−45 | SMWW4_v1c13350 | YP_007405158.1 |
| 1049699 | 4.1218E−45 | SMWW4_v1c09360 | YP_007404759.1 |
| 4296135 | 4.1218E−45 | yeaN | YP_007407775.1 |
| 4419488 | 4.1218E−45 | SMWW4_v1c40850 | YP_007407891.1 |
| 1347521 | 4.55375E−45 | kdpA | YP_007405036.1 |
| 1347533 | 4.55375E−45 | kdpA | YP_007405036.1 |
| 156541 | 4.59793E−45 | dppB | YP_007403975.1 |
| 2816076 | 4.59793E−45 | ydaN | YP_007406409.1 |
| 3844397 | 4.59793E−45 | cysK | YP_007407367.1 |
| 2018803 | 5.6407E−45 | yceA | YP_007405655.1 |
| 176654 | 5.88767E−45 | yhjK | YP_007403988.1 |
| 176722 | 5.88767E−45 | yhjK | YP_007403988.1 |
| 176784 | 5.88767E−45 | yhjK | YP_007403988.1 |
| 2796043 | 5.88767E−45 | SMWW4_v1c25770 | YP_007406393.1 |
| 2796045 | 5.88767E−45 | SMWW4_v1c25770 | YP_007406393.1 |

[0218] The p-value was calculated using the Fisher exact test based on contingency table with 4 fields: #samples Resistant/wild type; #samples Resistant/mutant; #samples not Resistant/wild type; #samples not Resistant/mutant

[0219] The test is based on the distribution of the samples in the 4 fields. Even distribution indicates no significance, while clustering into two fields indicates significance.

[0220] The following results were obtained
[0221] A total of 30.051 different correlations between genetic sites and anti-microbial agents were detected (p-value <10⁻¹⁰).
[0222] The biggest part of these were point mutations (i.e. single base exchanges)
[0223] The highest significance that was reached was 10⁻⁴⁸
[0224] Besides these, insertions or deletions of up to four bases were discovered
[0225] Further, potential genetic tests for five different drug classes relating to resistances were discovered
   [0226] β-lactams (includes Penicillins, Cephalosporins, Carbapenems, Monobactams)
   [0227] Quinolones, particularly Fluoroquinolones
   [0228] Aminoglycosides
   [0229] Polyketides, particularly Tetracyclines
   [0230] Folate synthesis inhibitors
[0231] Potential genetic tests for the tested drugs/drug combinations were discovered:

[0232] Amoxicillin/Clavulanate, Ampicillin, Ampicillin/Sulbactam, Aztreonam, Cefazolin, Cefepime, Ceftazidime, Cefuroxime, Cephalothin, Imipenem, Piperacillin/Tazobactam, Ciprofloxacin, Levofloxacin, Gentamycin, Tobramycin, Tetracycline, Trimethoprim/Sulfamethoxazol
[0233] Mutations were observed in 3.718 different genes

[0234] While in the tables only the best mutations in each gene are represented, a manifold of different SNPs has been found for each gene. Examples for multiple SNPs for two of the genes given in Table 3 are shown in the following Tables 13 and 14.

TABLE 13
Statistically significant SNPs in gene selB
(genbank protein accession number YP_007403906.1) (headers as
in Tables 3 and 4, respectively)

| | | | | best | |
|---|---|---|---|---|---|
| POS | drug | #drugs | drug class | drug | p-value |
| 86770 | TE | 1 | Polyketide* | TE | 3.6650E−047 |
| 86410 | TE | 1 | Polyketide* | TE | 5.9659E−031 |
| 86266 | TE | 1 | Polyketide* | TE | 6.3107E−022 |
| 86743 | TE | 1 | Polyketide* | TE | 6.5562E−043 |
| 86377 | TE | 1 | Polyketide* | TE | 1.2601E−018 |
| 87028 | TE | 1 | Polyketide* | TE | 8.7798E−025 |
| 86406 | TE | 1 | Polyketide* | TE | 2.8903E−014 |
| 86448 | TE | 1 | Polyketide* | TE | 1.8623E−013 |
| 86043 | TE | 1 | Polyketide* | TE | 7.2832E−016 |
| 86154 | TE | 1 | Polyketide* | TE | 4.7708E−015 |
| 86744 | TE | 1 | Polyketide* | TE | 3.7087E−047 |
| 86342 | TE | 1 | Polyketide* | TE | 1.4386E−016 |
| 86787 | TE | 1 | Polyketide* | TE | 1.6621E−015 |
| 86611 | TE | 1 | Polyketide* | TE | 3.9534E−010 |
| 86379 | TE | 1 | Polyketide* | TE | 4.1536E−011 |
| 87315 | TE | 1 | Polyketide* | TE | 7.2700E−017 |
| 86341 | TE | 1 | Polyketide* | TE | 8.2622E−042 |
| 86155 | TE; AM | 2 | polyketide*; | TE | 7.0844E−027 |
| | | | Lactams | | |
| 86482 | TE | 1 | Polyketide* | TE | 1.8840E−023 |
| 87219 | TE | 1 | Polyketide* | TE | 5.6863E−014 |
| 86158 | TE; AM | 2 | Polyketide*; | TE | 1.5954E−026 |
| | | | Lactams | | |
| 86016 | TE | 1 | Polyketide* | TE | 1.9196E−017 |
| 86860 | TE | 1 | Polyketide* | TE | 6.6181E−012 |
| 87027 | TE | 1 | Polyketide* | TE | 1.0395E−015 |
| 86803 | TE | 1 | Polyketide* | TE | 8.2435E−044 |
| 86030 | TE | 1 | Polyketide* | TE | 5.5168E−042 |
| 86742 | TE | 1 | Polyketide* | TE | 3.7087E−047 |
| 86446 | TE | 1 | Polyketide* | TE | 2.7424E−010 |
| 86684 | TE | 1 | Polyketide* | TE | 1.4554E−016 |
| 87500 | TE | 1 | Polyketide* | TE | 2.2039E−014 |

*(tetracycline)

TABLE 14
Statistically significant SNPs in gene
SMWW4_v1c00800 (genbank protein accession number
YP_007403907.1) (headers as in Tables 3 and 4, respectively)

| | | | | best | |
|---|---|---|---|---|---|
| POS | drug | #drugs | drug class | drug | p-value |
| 87790 | TE | 1 | Polyketide* | TE | 9.4526E−011 |
| 88055 | TE | 1 | Polyketide* | TE | 1.4844E−018 |
| 87559 | TE | 1 | Polyketide* | TE | 5.0631E−014 |
| 87777 | TE | 1 | Polyketide* | TE | 6.8034E−019 |
| 87780 | TE | 1 | Polyketide* | TE | 6.8873E−014 |
| 87742 | TE | 1 | Polyketide* | TE | 1.9135E−046 |
| 87606 | TE | 1 | Polyketide* | TE | 3.6313E−016 |
| 88111 | TE | 1 | Polyketide* | TE | 3.0716E−011 |
| 87551 | TE | 1 | Polyketide* | TE | 4.0293E−043 |
| 88337 | TE | 1 | Polyketide* | TE | 1.0046E−011 |

*(tetracycline)

[0235] Similar results were obtained for other genes but are omitted for the sake of brevity.

[0236] Further, a synergistic effect of individual SNPs was demonstrated by exhaustively comparing significance levels for association of single SNPs with antibiotic susceptibility/resistance and significance levels for association of combinations of SNPs with antibiotic susceptibility/resistance. For a representative example of 2 SNPs the significance level for synergistic association of two SNPs was improved with the values given in Table 15 compared to the association of either SNP alone, given for exemplary different antibiotics.

TABLE 15
Synergistic increase for association of two SNPs

| drug | POS 1 | Ref | Alt | POS 2 | Ref | Alt | Improv [%] |
|---|---|---|---|---|---|---|---|
| CAX | 1398352 | C | T | 86770 | G | A | 7553.8 |
| CFT | 1398352 | C | T | 86770 | G | A | 4906.1 |
| CP | 1398352 | C | T | 86770 | G | A | 7217.7 |
| LVX | 1476885 | C | G | 1487651 | G | T | 1016.6 |
| CAX | 1476885 | C | G | 86770 | G | A | 35186.3 |
| CFT | 1476885 | C | G | 86770 | G | A | 5234.5 |
| CP | 1476885 | C | G | 86770 | G | A | 16666.2 |
| LVX | 1476885 | C | G | 86770 | G | A | 791.3 |
| AM | 1487651 | G | T | 1490996 | T | G | 27110310435.0 |
| A/S | 1487651 | G | T | 1490996 | T | G | 7387639463717348.0 |
| AUG | 1487651 | G | T | 1490996 | T | G | 22882381295241392.0 |
| LVX | 1487651 | G | T | 2371667 | C | T | 203.3 |
| AM | 1487651 | G | T | 3249370 | A | G | 4745162369.1 |
| A/S | 1487651 | G | T | 3249370 | A | G | 151190127735.9 |
| AUG | 1487651 | G | T | 3249370 | A | G | 15974939963.6 |
| AM | 1487651 | G | T | 3244657 | A | C | 16268568579657476096.0 |
| A/S | 1487651 | G | T | 3244657 | A | C | 4856552041684392738816.0 |
| AUG | 1487651 | G | T | 3244657 | A | C | 155903606914389435744256.0 |
| CAX | 1487651 | G | T | 3244657 | A | C | 106.2 |
| LVX | 1487651 | G | T | 3244657 | A | C | 397.9 |
| LVX | 1487651 | G | T | 3243004 | C | G | 108.5 |
| LVX | 1487651 | G | T | 3231402 | C | A | 108.5 |
| AM | 1487651 | G | T | 3025014 | T | G | 3083339089536906.5 |
| A/S | 1487651 | G | T | 3025014 | T | G | 90906560360858533888.0 |
| AUG | 1487651 | G | T | 3025014 | T | G | 14107165708602796032.0 |
| CVX | 1487651 | G | T | 3025014 | T | G | 2699.8 |
| LVX | 1487651 | G | T | 2816076 | A | C | 17548.3 |
| T/S | 1487651 | G | T | 2816076 | A | C | 389.5 |
| LVX | 1487651 | G | T | 2687128 | G | C | 106.3 |
| AM | 1487651 | G | T | 1347521 | A | G | 11992584461895092224.0 |
| A/S | 1487651 | G | T | 1347521 | A | G | 4643772663859210878976.0 |
| AUG | 1487651 | G | T | 1347521 | A | G | 184828098872227756244992.0 |
| CAX | 1487651 | G | T | 4057459 | T | G | 125.8 |
| AM | 1487651 | G | T | 4143093 | A | G | 12911802015.4 |
| A/S | 1487651 | G | T | 4143093 | A | G | 12019751974.7 |
| AUG | 1487651 | G | T | 4143093 | A | G | 20840834.3 |
| LVX | 1487651 | G | T | 176654 | T | G | 133.4 |
| AM | 1487651 | G | T | 1490996 | T | G | 115930572249.5 |
| A/S | 1487651 | G | T | 1490996 | T | G | 53491140266121.4 |
| AUG | 1487651 | G | T | 1490996 | T | G | 2515400175210.6 |
| LVX | 1490996 | T | G | 3025014 | T | G | 2373.7 |
| AM | 1490996 | T | G | 3844397 | A | C | 283621833823.0 |
| A/S | 1490996 | T | G | 3844397 | A | C | 104788504079843856.0 |
| AUG | 1490996 | T | G | 3844397 | A | C | 466668336295372718080.0 |
| A/S | 1490996 | T | G | 4143093 | A | G | 141.3 |
| AUG | 1490996 | T | G | 4143093 | A | G | 618537.6 |
| CAX | 2371667 | C | T | 86770 | G | A | 1253.5 |
| CFT | 2371667 | C | T | 86770 | G | A | 1474.7 |
| CP | 2371667 | C | T | 86770 | G | A | 7023.8 |
| AM | 3249370 | A | G | 3844397 | A | C | 72173352.7 |
| A/S | 3249370 | A | G | 3844397 | A | C | 1900805046.5 |
| AUG | 3249370 | A | G | 3844397 | A | C | 218882023.8 |
| CAX | 3249370 | A | G | 86770 | G | A | 587.2 |
| CFT | 3249370 | A | G | 86770 | G | A | 219.3 |
| CP | 3249370 | A | G | 86770 | G | A | 884.9 |
| AM | 3244657 | A | C | 3844397 | A | C | 190953014122141712384.0 |
| A/S | 3244657 | A | C | 3844397 | A | C | 25329068978362900283392.0 |
| AUG | 3244657 | A | C | 3844397 | A | C | 71670411780770886095732736.0 |
| AUG | 3244657 | A | C | 4143093 | A | G | 146873214.6 |
| CAX | 3244657 | A | C | 86770 | G | A | 1677.7 |
| CFT | 3244657 | A | C | 86770 | G | A | 1835.9 |
| CP | 3244657 | A | C | 86770 | G | A | 5013.9 |
| CAX | 3243004 | C | G | 86770 | G | A | 1677.7 |
| CFT | 3243004 | C | G | 86770 | G | A | 1835.9 |
| CP | 3243004 | C | G | 86770 | G | A | 5013.9 |
| CAX | 3231402 | C | A | 86770 | G | A | 1677.7 |
| CFT | 3231402 | C | A | 86770 | G | A | 1835.9 |
| CP | 3231402 | C | A | 86770 | G | A | 5013.9 |
| AM | 3025014 | T | G | 3844397 | A | C | 1908359560282912063488.0 |
| A/S | 3025014 | T | G | 3844397 | A | C | 3517228373184417125229395968.0 |
| AUG | 3025014 | T | G | 3844397 | A | C | 589175898363033562145240383488.0 |
| CAX | 3025014 | T | G | 3844397 | A | C | 609.0 |
| A/S | 3025014 | T | G | 4143093 | A | G | 55269.5 |
| AUG | 3025014 | T | G | 4143093 | A | G | 2734964708.4 |
| CAX | 3025014 | T | G | 86770 | G | A | 5471.0 |
| CFT | 3025014 | T | G | 86770 | G | A | 898.6 |
| CP | 3025014 | T | G | 86770 | G | A | 75921.3 |
| LVX | 3025014 | T | G | 86770 | G | A | 1916.7 |
| LVX | 2816076 | A | C | 4149382 | G | C | 268.1 |
| CAX | 2816076 | A | C | 86770 | G | A | 184.4 |
| CFT | 2816076 | A | C | 86770 | G | A | 168.2 |
| CP | 2816076 | A | C | 86770 | G | A | 28668.1 |
| LVX | 2816076 | A | C | 86770 | G | A | 2334.7 |
| LVX | 2816076 | A | C | 4339539 | G | C | 458.4 |
| LVX | 2816076 | A | C | 5025276 | A | C, G | 2713.8 |
| CAX | 2687128 | G | C | 86770 | G | A | 1916.6 |
| CFT | 2687128 | G | C | 86770 | G | A | 1847.8 |
| CP | 2687128 | G | C | 86770 | G | A | 7145.1 |
| AM | 1347521 | A | G | 3844397 | A | C | 653844900357359488.0 |
| A/S | 1347521 | A | G | 3844397 | A | C | 90364851419934834688.0 |
| AUG | 1347521 | A | G | 3844397 | A | C | 7523760822642906169868288.0 |
| AUG | 1347521 | A | G | 4143093 | A | G | 3963922539.7 |
| CAX | 1347521 | A | G | 86770 | G | A | 308.6 |
| CFT | 1347521 | A | G | 86770 | G | A | 205.9 |
| CP | 1347521 | A | G | 86770 | G | A | 1005.6 |
| CAX | 3716584 | G | A | 86770 | G | A | 176781.7 |
| CFT | 3716584 | G | A | 86770 | G | A | 141473.9 |
| CP | 3716584 | G | A | 86770 | G | A | 117836.8 |
| AM | 3844397 | A | C | 4057459 | T | G | 1732.3 |
| A/S | 3844397 | A | C | 4057459 | T | G | 64489837.0 |
| AUG | 3844397 | A | C | 4057459 | T | G | 3267527.0 |
| AM | 3844397 | A | C | 4143093 | A | G | 6257499746192352.0 |
| A/S | 3844397 | A | C | 4143093 | A | G | 143764130498273056.0 |
| AUG | 3844397 | A | C | 4143093 | A | G | 40284225184437.6 |
| CP | 3844397 | A | C | 86770 | G | A | 1725.6 |
| LVX | 3844397 | A | C | 86770 | G | A | 190.4 |
| AM | 3844397 | A | C | 1490996 | T | G | 2185306317.5 |
| A/S | 3844397 | A | C | 1490996 | T | G | 601032319774.7 |
| AUG | 3844397 | A | C | 1490996 | T | G | 5658475370741.3 |
| CFT | 4636300 | T | C | 4149382 | G | C | 100.3 |
| CAX | 4636300 | T | C | 86770 | G | A | 491347.8 |
| CFT | 4636300 | T | C | 86770 | G | A | 364274.8 |
| CP | 4636300 | T | C | 86770 | G | A | 181329.0 |
| CAX | 4057459 | T | G | 86770 | G | A | 30600.0 |
| CFT | 4057459 | T | G | 86770 | G | A | 979.7 |
| CP | 4057459 | T | G | 86770 | G | A | 7592.1 |
| LVX | 4057459 | T | G | 86770 | G | A | 138.6 |
| CAX | 4143093 | A | G | 86770 | G | A | 811.9 |
| CFT | 4143093 | A | G | 86770 | G | A | 192.7 |
| CP | 4143093 | A | G | 86770 | G | A | 24441.6 |
| LVX | 4143093 | A | G | 86770 | G | A | 11804.8 |
| CAX | 86770 | G | A | 176654 | T | G | 12106.4 |
| CFT | 86770 | G | A | 176654 | T | G | 11346.3 |
| CP | 86770 | G | A | 176654 | T | G | 4412.3 |
| CAX | 86770 | G | A | 4296135 | A | C, G | 2156. |
| CFT | 86770 | G | A | 4296135 | A | C, G | 1515.8 |
| CP | 86770 | G | A | 4296135 | A | C, G | 8097.4 |

POS 1, 2 = position 1, 2 used for combination;
Ref = reference base;
Alt = alternated base in samples;
improv = improvement compared to minimum p-value of single SNP

[0237] For example, the improvement of 8097.4% in the last example with positions 86770 and 4296135 for CP results from a p-value change from 1.90043e-11 to 2.34696e-13.

[0238] Again, similar results were obtained for other SNPs in respective genes.

[0239] A genetic test for the combined pathogen identification and antimicrobial susceptibility testing direct from the patient sample can reduce the time-to actionable result significantly from several days to hours, thereby enabling targeted treatment. Furthermore, this approach will not be restricted to central labs, but point of care devices can be developed that allow for respective tests. Such technology along with the present methods and computer program products could revolutionize the care, e.g. in intense care units or for admissions to hospitals in general. Furthermore, even applications like real time outbreak monitoring can be achieved using the present methods.

[0240] Instead of using only single variants, a combination of several variant positions can improve the prediction accuracy and further reduce false positive findings that are influenced by other factors.

[0241] Compared to approaches using MALDI-TOF MS, the present approach has the advantage that it covers almost the complete genome and thus enables us to identify the potential genomic sites that might be related to resistance. While MALDI-TOF MS can also be used to identify point mutations in bacterial proteins, this technology only detects a subset of proteins and of these not all are equally well covered. In addition, the identification and differentiation of certain related strains is not always feasible.

[0242] The present method allows computing a best breakpoint for the separation of isolates into resistant and susceptible groups. The inventors designed a flexible software tool that allows to consider—besides the best breakpoints—also values defined by different guidelines (e.g. European and US guidelines), preparing for an application of the GAST in different countries.

[0243] The inventors demonstrate that the present approach is capable of identifying mutations in genes that are already known as drug targets, as well as detecting potential new target sites.

[0244] The current approach enables
[0245] a. Identification and validation of markers for genetic identification and susceptibility/resistance testing within one diagnostic test
[0246] b. validation of known drug targets and modes of action
[0247] c. detection of potentially novel resistance mechanisms leading to putative novel target/secondary target genes for new therapies

The application's sequence listing, which the Patent Office published only in electronic form, follows.

SEQUENCE LISTING (1 sequence)

SEQ ID NO: 1 - DNA, 5241455 bp, Serratia marcescens WW4 (residues 1-1,747,152 of 5,241,455)
tttttttagttaatttactttctattaacacaaaaaacgcggctaattagcgacaatagagtaattgcatttagaaatagtcacgttagcaatcatgtgcgaaagattggcgtttgctgctaatgttaattggctgttggaatattgccccgctgcttgtcaataaaaggttttcatcgggtatacggattgtttttgaacagttaactagtaatgttttgatttatataattttttgatcgctcaaattgctaaagacggtttggttgaccatcggctataaatcaggaagggacattactgtgatcagcttcgcgtttctaaacgcaacgctggaataatcagacaattaaatgcgccctattattccgaccgttttcttgtgaaaataggctggaatagggaaatttaaataattgttcaccttttcgctacttatcgattgaattcgttggtatgccccgtataatttgctcgttttttgctgcttgactcaggacagcaaaaacagttgtatacgtcactcagcataccccctctggggtacggagagaacaaacgtcatgtctgtgtccctttacagcgggaaagtcgcacgcaaactgctgtttttgcagttaatgacttttgttctgatcagcgttgctttctggctgaaaagcccggaatggagcgcttcggcgttggcaggcggtctcgccgcctggttgccgagtgcaatgtttatgctgtttgccttgcgccatcaggcgcaaacgccggcgcccggtagggttgcctggtcgttcgccatcggcgaggggctaaaggtcgtgatcaccatcgttttgctgatcgtggcgctgggggtgttcaaggcggagtttataccgcttggcctgacctatttagcggtgttagtggtgcagatagtggcaccggccgtgattaacagttaccgaacttaactaaataagggtaagaggcatcatgtctgcaggagaagtcttgactccacaggagtatatcggtcaccacctgacgcagcttcaggtcgggactgggttctggtcgatcaacatcgactcgatgtttttctccgtcgtcctcggggcgcttttcctggtgatcttccgcaaagtggccaaaaacgccaccagcggcgtgccgggtaaactgcaaaccgccgtggagctggtggtcggtttcgtcgacagcagcgtgcgcgacatgtaccacggcaagagcaaggtgattgcgccgctggcgctgaccgtgttcgtctgggtgttcctgatgaacctgatggatttgctgcccatcgacttcctgccttacgttggcgaacacatcctcggcctgcctgcgctgcgcgtagtgcctaccgccgatgtaaacgtcacgctgtcgatggcgctgggcgtgtttatcctgattctgttctatagcatcaaaatgaaaggcgttggcgggttcgttaaagagttgaccatgcagccgttcaaccaccctgtattcattcctatcaacctgattcttgaaggtgtcagcctgctgtccaaacctgtttcactgggtctgcgactgttcggcaacatgtatgcgggtgagttgatcttcatcctgattgccggcctgttgccgtggtggtcacagtgggtcctgagcttgccttgggctatcttccacatcctgatcattacgcttcaagcctttattttcatggttctgacgatcgtctatctgtcgatggcgtctgaagagcactgattttcttaaaacacttgcacttttaaactgaaacaaactggagactgtcatggaaaacctgagtatggatctgctgtacatggctgccgctgtgatgatgggtttagcggcaatcggtgctgcgatcggtatcggcatcctgggtggtaaattcttggaaggcgctgctcgtcagcctgacctgattcctctgctgcgtacacagttctttatcgttatgggtctggtcgacgccatcccgatgatcgctgtaggtctgggtctgtacgtgatgttcgccgtcgcgtaagtagagcaaccctctacgacgtaaccaaactattaacttttaaagaggcattgtgctgtgaatcttaacgcaacaatcctcggccaggccatcgcgttcgttctgtttgtctggttctgcatgaagtacgtatggccgccgatcatggctgccatcgagaagcgtcagaaagaaatcgctgacggcctcgcttctgcagagcgtgccaaaaaagatctggacttagcgcaagccaatgcgaccgaccagctgaaaactgccaaagcagaagctcaggtgatcatcgagcaagcgaacaaacgcaaagctcagatcatggatgaagcgaaagccgaagccgagcaggaacgtaacaaaatcgtggcgcaggctcaggctgagatcgaagccgaacgtaagcgcgctcgtgaagagttgcgtaagcaagtcgcgatgctggcaattgccggcgccgagaagatcatcgaacgttccgtggatgaagctgctaacagcgacatcgttgataaactggtcgctgaactgtaaggagggaggggctgatgtctgaatttgtaactgtagctcgcccctacgccaaagcagcttttgactttgccgttgagcaccaaagcgtagagcgctggcaggacatgctggcgtttgcggctgaagtcactcgcaatgaacagatttctgaactgctgtctggcgcggttgcgccagaaacgctgtccaagacgttcatcgcggtttgtggcgatcggctcgacgaacatggccagaactttatccgtgtaatggccgaaaatggacgtttactggttcttcctgccgtgctgcagcagttcatcgaactgcgcgcctcgctggaatccaccgtcgaagtcgaagtgctctctgcgagcgcgctgaacgacgaacagcaggcgaaaatcgccgctgcgatggaaaaacgtctgtcacgcaaagttaagctgaattgcaaaattgacaagtctgtactggccggcatcgttgttcgcgccggcgatatggtgattgatggcagcgttcgcggtcgtcttgaacgcctgacagacgtcttgcagtcttaaggggactggagcatgcaactgaattccaccgaaatcagcgaactgatcaagcagcgcattgctcagttcaatgtagtgagcgaagctcacaatgaaggtactatcgtttccgtcagtgacgggatcatccgcgtacacggcctggccgaagttatgcagggcgaaatgatcgcgctgcctggcaaccgttacgcaatcgcattgaacctggagcgcgactccgttggtgccgtggtcatgggtccgtacgcggatctggccgaaggcatgaaggtgaaatgcaccggccgtatcctggaagttccagtcggtcgtggtctgctgggccgcgtagttaacaccctgggcgcaccaatcgacggcaaaggcccgattgagaacgacggtttctctccggtagaagctatcgcgccaggcgttatcgagcgtcagtccgttgatcagccggttcagactggctacaaatccgttgacgccatgattccaatcggccgtggccagcgtgagctggtgatcggtgaccgtcagaccggtaaaaccgcgctggcgatcgatgcgatcatcaaccaacgcgactccggcatcaaatgcgtttacgtggctatcggccagaaagcgtccaccatcgctaacgtggtgcgcaaactggaagagcacggcgcactggccaacaccatcgtggtggtggcgaccgcttccgaatccgctgcactgcaatacctggcgccatatgccggttgcgcaatgggcgaatacttccgtgaccgcggtgaagatgcgctgatcgtgtacgatgacctgtccaaacaggccgttgcttaccgccagatttccctgctgcttcgtcgtccgccaggtcgtgaagcttacccaggcgacgtattctacctgcactcccgcttgctggagcgcgcagcgcgcgtcaacgccgaatacgttgaagccttcaccaaaggtgaagttaaaggccaaaccggttcactgaccgctctgccgatcattgaaacccaggcgggtgacgtttccgcgttcgttccgaccaacgtaatctcgattaccgatggtcagatcttcctggaatccaacctgttcaactccggtattcgtccggcagttaacccgggtatctccgtatcccgtgttggtggcgccgcgcagaccaagatcatgaagaaactgtccggcggtatccgtaccgcgctggcgcagtatcgtgaactggctgcgttctcccagttcgcctccgatctggacgacgcgacccgcaaacagctgagccacggtcagaaagtgaccgagctgctgaaacagaaacagtatgcgccgatgtcggttgcacaacagtctctggtgctgtttgccgcagaacgcggttacctgaacgacgtcgaagtcgccaaagtggtgagcttcgaagccgcgctggtcgcctatgcggaccgcgagcacgccgaactgctgaaccacatcaaccaaactggcaacttcaatgatgagatcgagggcaagttgaaagacatcctcgagaccttcaagaaaacccagtcctggtaacgccgaacggtcctgctgttgaaagacagcaggccgtctggcactgaggagaagcagagatggccggcgcaaaagagatacgtagtaagatcgctagcgtgcaaaacacgcaaaagatcactaaagcgatggaaatggtcgccgcctccaaaatgcgtaaatcgcaggatcgcatggcggccagccgtccttatgcagagaccatgcgcaaagtgattggtcaccttgcgttagggaatctggagtacaagcacccgtacctggatgagcgtgacgttaagcgcgtcgggtatctggtggtgtctactgaccgtggtctctgcggcggcttgaacatcaacctgttcaaaaagctgctggcggagatgaaagcctggtccgaaaaaggcgtcgaaaccgatttggcgctgattggctctaaagcggcctctttctttggttccgtgggcggcaacgtggttgcccaggtgaccggcatgggggataaaccttccctgtcggatctgatcgggccggtgaaagtgatgttgcaggcctacgacgaaggtcgtttggacaagctgtacattgtcagcaacaaatttgttaatacgatgtcccaagagccgcaggtgcttcagctgctgccgttaccgccagccgatgacgaagagctgaagaaaacgccttgggattacctgtatgaacccgatccaaaagtgctgcttgataccttgctgcgccgctatgtggagtcgcaggtttatcagggcgtcgtggaaaacctggccagcgagcaggccgcacgaatggtcgcgatgaaagccgcaaccgataacggcggtagcctgatcaaagagctgcagttggtatacaacaaggcgcgtcaggccagcatcactcaggaactcaccgagatcgtttcgggagcctccgcggtttaagctaggtttacgaattacgtagaggattcaagatggctactggaaagattatccaggtaatcggcgccgtggtggacgtcgagttccctcaggatgccgtaccgaaagtgtacgacgcccttgaggtagaaaacggcaccgaaaaactggtgttggaagttcagcaacagctgggcggtggcgtggttcgctgtatcgcaatggggacctccgacggtctgcgtcgcggtctgaaagtgaacaacctgaaccacccgattgaagtgccggtgggtaaagctaccctgggccgtatcatgaacgtattgggtcaaccgatcgacatgaaaggcgacatcggcgaagaagagcgttgggcgattcaccgcgcggcgccaagctacgaagagctgtccaactcccaggaactgctggaaaccggtatcaaggtaatggacctgatttgtccattcgccaagggcggtaaagtcggtctgttcggcggtgcgggcgtaggtaaaaccgtaaacatgatggagctgatccgtaacatcgcgatcgagcactccggttattccgtgttcgcgggcgtgggcgagcgtactcgtgagggtaacgacttctaccacgaaatgacagactccaacgttctggacaaagtatctctggtttacggccagatgaacgagccaccaggtaaccgtctgcgcgttgcgctgaccggtctgaccatggcggagaaattccgtgacgaaggccgtgacgttctgctgttcgttgacaacatctaccgttacaccctggccggtaccgaagtgtccgcacttctgggccgtatgccatccgcggtaggttatcagccaacgctggcggaagagatgggcgttctgcaagaacgtatcacctcgaccaagaccggttccatcacttccgtacaggccgtttacgttcctgcggatgacttgactgacccgtctccagccaccacctttgcgcacttggacgcaaccgtggtactgagccgtaacatcgcttctctgggtatctacccggccgttgacccgctggattccaccagccgtcagctggatccgctggttgttggccaggagcactacgacgtagcgcgtggcgtgcagtccattctgcaacgttaccaggaactgaaagatatcatcgcgatcctgggtatggacgagctgtctgaagaagacaaactggtcgtatcccgtgcgcgtaagatccaacgcttcctgtctcagccgttcttcgtggcagaagtcttcaccggttctccgggcaagttcgtatcgctgaaagacaccatccgtggtttcaaaggcattatggacggcgactatgaccacctgccggagcaggcgttctacatggttggcaccattgaagaagcagtggaaaaagccaagaaactgtaacgccttgagaggagggtgatatggctatgacttaccatctggatgtagtcagcgcggaaaaacagatgttttccggcctggtgcagaagatccaggtgacaggcagcgaaggtgaactggggatcttccctggccatgcgccgctgctgactgccatcaagcctggcatggtgcgtattgttaagcagcacggtgaagaagagttcatctacctgtccggcggcatcctcgaggtgcagccgagcgtggttaccgtgctggcggacactgctatccgtggtactgacctcgacgaagcgagagcgttggaagctaagcgtaaagctgaagaacacattcgcagctctcatggcgatgtcgactatgctcaggcatccgctgaactggcgaaagcgatcgcaaaactgcgcgttatcgagctcaccagaaaagcgatgtaatgtttgggtgcccggcacccaactttaagaaagcggcctatagggtcgctttttttttactttaaaataagcatttcagcccggcgggcggtgtggtgtataaccgctgatatcgggaaataaacgtcgccgatcgccgacagttttttcgtcccgacgccgaattagccgtgatagcggcagaccaaggcccacgcggcctgcgccgggttcgtgcagagaaatatgtagtaatatcgtcgctaaacggttttactttcgtctatcaaaatggagttatcaggttgcttatgtcgaacagcgcaatgagcgtggtcatcctcgccgcgggcaagggaacacgcatgtattccgatcttcccaaggttttacatccgttggccggcaagccgatggtgcaacacgtcattgatgccgcgatgaaactgggcgcgcaacaggttcatctggtatacggccacggcggcgatctgttgaaaagcacgttgaccgaaggcgcgctgaactgggtgctgcaggccgagcaactgggtaccggccatgcgatgcagcaggccgcgccgcactttgccgacgatgaagacgtgctgatgctgtacggcgatgtgccgttaatctccgtggatacgctgcaacgcctgctggcggccaagccgcagggcggcatcggcctgctgacggtcaagctggacgatccgagcggttacggccgcatcgtgcgtgagcagggcaacgtggtgggcatcgtcgaacacaaggacgccagtgaggcacagcgccagatcaacgagatcaataccggcatcctggtggcgaacgggcgcgatctgaagcgctggctgggaatgttgaataacgacaacgcacagggcgagttttacatcaccgatatcattgcgttggcccatgccgacggcaagaaaatcgaagccgtgcacccgtcgcgtttaagtgaagtggaaggcgtgaacaaccgtctgcagctggcgactctggagcgcgtattccagtcggaacagtctgaaaagctgctgttggccggcgtgatgttgttggatccggcgcgtttcgatctgcgcggggaacttgttcacggccgtgacatcactattgatgcgaatgtgattatcgaaggtcacgtcaagctgggcgaccgggtgaaagtcggcgccggctgcgtgctgaaaaactgcgtgattggcgataactgcgagatcagcccttacagcgtgctggaagacagcgtgctggaagcagactgcacggtggggccgttcgcccgcctgcgcccaggcgcggagctggcggcaggggctcacgtcggcaacttcgtggaaatgaaaaaggcgcgtctgggcaaaggctccaaggccggccacctcagctacctgggcgatgccgaaatcggtgatgacgtgaatatcggcgccggcaccatcacctgtaactacgatggcgccaacaagcacaaaacgctgatcggcgatggcgtgttcgtcggttccgatactcagctggtggcgccggtgtcggtcggcaaaggatccaccatcgccgccggcaccacggtgacgcgcgatatcgccgagaacgaactggtgctgagccgcgtcaagcaggtgcacattcagggttggcaacgtccggtgaagaagaagccatagtgtgttttgcgttgggctccgttcagagcccaatacaaaacataataacccccaccatctacaggctcgggggacgcacggtaaaaaccggcaaaaatcaggtcaaggcatcgaaagcgcccatgaagggcgttcattaggaatataactgatgtgtggaattgtaggcgcagtagcgcaacgtgatatcgcagaaatcctgttggaaggtttacgtcgtctcgagtatcgcggttatgactccgctggtctggcggtggtcgatgaaaaaggcaacgtcagtcgcctgcgtcgcgttggcaaggtacaaaagctggccgaagcggcggaacaaaccgatctgcacggcggtaccggcatcgctcacacccgttgggctacgcacggtgaaccgaccgaagcgaacgcgcacccgcatgtttccgactacattaccgtggtgcataacggcatcatcgaaaaccacgagccgctgcgcgaactgctgattgaacgcggttaccgtttcagctctgaaaccgacaccgaagtgattgcgcacctggtgcactgggaacaactgcaaggcggtacgctgctggaagtggttcagcgcgtgatcccgcagctgcgcggcgcttatggcaccgtggtgatggacagccgcgatccgagcgtgctggtcgcggcgcgttccggcagcccgctggttatcggccgcggcgtcggggaaaacttcatcgcttccgatcagctggcgctgctgccggtcacccgtcgcttcatcttcctggaagagggcgacgtggtggaagtgactcgccgcaccgtcaacatcttcgacaaacagggcaacgccatcgagcgtcctgagatcgaatcccaggtgcagtatgacgccggcgacaagggcgcttatcgccactacatgcaaaaagagatttacgaacagccgctggcgctgaaaaacaccctggaagggcgtttcagtcatggccaaatcaacctgagtgagctggggccgcacgccgacgagttgctcgccaaggtgcagcacgtgcagattatcgcctgtgggacttcttaccactccggtatggtggcgcgttactggttcgaagcgctggccggcgtgccgtgcgatgtcgagatcgcgtccgaattccgttaccgcaaatcggcggtgcgtccgggcagcctgatcatcactctgtcgcagtccggcgaaaccgccgacaccctggcggcgctgcgcctgtccaaagagctgggttatctcggttcgctggccgtttgtaacgttgccggctcttcgctggtgcgcgaatccgatctggcgctgatgaccaaagcgggtacggaaatcggtgtagcctcgaccaaagccttcaccacgcagctcaccgtgctgttgatgctggtggcgcgcctgggccgtctgaaaggcatggcggaaagcgtggagcacgagatcgtgcatggtctgcaggcgctgccggcgcgtatcgagcagatgctgtcgatggataaagagatcgaagcgctggcggaaggcttctccgacaagcaccatgcgctgttcctcggccgcggcgatcagtatccgatcgccatggaaggggcgctgaagctgaaagagatctcctatattcacgctgaagcttatgcggcgggtgagttgaaacacggcccgctggcgctgatcgacgccgatatgccggtgatcgtggtggcgccaaacaacgaactgctggaaaagctgaagtccaacattgaagaagtgcgcgcgcgcggcggccagctgtacgtgttcgccgatcaggacgccggcttcgtcagcagcgaaggcatgaccctcattcctctgccgcacgtcgaggaaatcgtcgcgccgatcttctacaccgtgccgttgcagctgctgtcttaccacgtggcgctgatcaagggcaccgacgttgaccagccgcgcaacctggcgaagtctgtcaccgtagagtaatttgtcacaggtaaactgcaaaagccggccttagcgccggcttttttcatgagtgaccttaaagatgacagcgctgccgtttcggtgataaacgttgtcatattcaagcggataggccgcgccaagccggttttttattgcttgggaaatgtgctgtttcacggctaaccttctgatttacataaaaacaaatacctatcaaatacgctgtaatataactgtcatattgcgtacatttttctgtcaccaaactgtcctattttccctcctgcagcaatacttactctgattaaaacgactcgaagtcgattttaagtatcccattaggagggattatgaaactgatgcgtaccaccgtcgccagtattgtggcagcgaccttctccctgaccgccgtgtccgcgttcgctgctgccagcctgaccggtgcaggtgcgacattccccgctccggtttacgccaagtgggcagattcttatcagaaagaaaccggcaacaaagttaactatcagggcatcggctcctctggcggcgtgaagcaaatcgtggccaacaccgttgactttggtgcctccgacgccccgctgtctgacgacaagctggcggccgacggcctgttccagttcccgaccgtgattggcggcgtggtgctggcggtgaatatcccgggcatcaaatccggcgaactgacgctggacggcaaaaccctgggcgatatctacctgggcaacgtcaaaaagtggaacgatccggctatcaccaagctgaacccaggcgtgaaactgcctgaccagaacatcgccgtagtgcgccgcgccgacggttccggcacctcgttcgtgttcaccagctacctgtccaaggccaatgcgcagtggaaagaaaagattggcgccggttctaccgttaactggccgaccggtctgggcggtaaaggcaacgacggcatcgccgccttcgttcagcgcctgccaggctctatcggctacgtagaatacgcttacgccaagcagaacaacctggcttacaccaagctggtgtccgccgacggcaaaccggtcagcccgaccgaagagagcttcagcaacgccgccaaaggcgcggattggagcaaaactttcgctcaggatctgactgaccagaaaggcgacaacgtgtggccaatcacctccaccaccttcatcctggtgcacaaagagcagaaaaaccctgctcagggcgccgaagtgctgaagttcttcgactgggcgtataaaaccggtgcaaaacaagctaacgagctggattacgccaccctgccggcagaagtggttgagcaggtgcgtgcggcctggaaaaccaacgtaaaagacagttcaggtaaagcgctgtactaacaacgcaggggcgcgggttcgccgcgccccacacagttcttcaggctccgatcccggttggggctgccagggttcaaacagagagtaatctatggctgagtacaagccgaccatcaaagcaccgggcaaaaacggtgacatcattttcagcgcgctggtgagactggctgcgctgattaccctattgttgctgggtggcatcatcgtttcgctgatcttcgcctcctggccaagcatgcagaaattcggctttgcgttcctgtggaccaaagagtgggacgcgccggcggagcagttcggcgcgctggtgccgatctacggcaccgtggtcacctcgcttatcgcgctgatcatcgccgtgccggtgagcttcggcatcgcgctgttcctgaccgaactggcgccgaactggctgaagcggccgctgggcatcgccattgagctgctggcggccattccgagcatcgtctacggcatgtggggcctgttcgtgttcgccccgctgttcgccgaatacttccagacgccggtgggcgaagtactgtcgggcattccaatcgtcggcgagctgttctccggcccggccttcggcatcggcatcctggccgccggggtgatcctggcgatcatgatcattccttacattgctgcggtgatgcgcgacgtgttcgaacagaccccggtaatgatgaaagagtcggcctacggtatcggctgcaccacctgggaggtcatctggcgcatcgtgctgccgttcaccaaaaacggcgtcatcggcggcgtgatgttgggcctgggccgcgcgctgggggaaaccatggcggtgacctttatcatcggcaacacctaccagctcgacagcgcttcgctgtacatgccgggcaacagcatcacctcggcgctggccaacgaattcgctgaagccgagtccggcgtgcacaccgccgcgttgatggagctgggcctgattctgtttgttatcacctttatcgtgctggcgctgtcgaaactgatgatcatgcgtctggccaagaatgaggggcgttaacatggcgacgatggatatgcaaaacgcagtcgttctggcggaaagccgccgcaaaatgcaggcctggcgccggcagaaaaaccgcctcgcgctgttcctgtcgatggcgaccatggcgttcgggctgttctggctgatctggatcctgatcgccaccgtcaccaaaggcttcgacggcatgtcgctggcgctgttcaccgagatgaccccgccgccgaataccgcgggcggcggcctggccaacgccatcgccggcagcggtctgctgatcctgtgggcgaccctcttcggtacgccgctgggcatcatggccggcatctacctggcggaatacggccgtaaatcctggctggcggaagtgatccgctttatcaacgacattctgctctccgcaccgtcgatcgtggtgggcctgttcgtttacaccatcgtggtggcgaagatggaacacttctccggttgggccggcatcgtggcgctggcgctgctgcaggtgccgatcgtcattcgcaccaccgagaacatgctgaagctggtgccggatacgctgcgcgaggccgcttatgcgctgggcacgccgaaatggcgcatgatttccgctatcacgctgaaggcgtcggtgtccggcatcatcaccggcgtgctgctggcgattgcgcgtatcgcgggggaaacggcgccgctgctgttcacctcgctgtcgaaccagttctggagcaccgacctgatgcagccgatcgccaacctgccggtgaccatcttcaaattcgccatgagcccgttcgccgaatggcagcagctggcctgggccggggtgctgttgatcaccctgtgcgtactgttactgaatatcctggcgcgcgtaattttcgccaagaaaaagcattcataaaattttgagcgccgctttggcggcgctgatgaaaagagagaagtcttgatgagtatggttactgacgcttccagcagcaaaattcaggtacgcgatctgaacttctactacggcaaattccatgcgctgaagaacatcacgctggatatcgccaagaacaaggtcaccgcgtttatcggcccctccggctgcggcaaatccaccctgctgcgcaccttcaacaagatgtaccagctgtacccggaacagcgtgcggaaggcggcatcctgctggacggccagaacatcctgaccgacaactcggatatcgcgctgctgcgcgccaaggtcggcatggtgttccaaaagccgacgccgttcccgatgtcgatttacgacaacatcgccttcggcgttcgcctgtttgaaaagctgtcgcgcgccgatatggacgagcgcgtgcagtgggcgctgaccaaggcggcgctgtggaacgaaaccaaggacaagctgcaccagagcggctacagcctctccggcggccagcagcagcgtctgtgcatcgcccgcggcatcgccattcgtccggaagtgctgttgctggatgagccttgctcggcgctggatccgatctccaccggcaagattgaagagctgatcagcgaactgaaggccgattacaccgtggtgattgtgacgcacaacatgcagcaggcggcgcgctgctccgactctaccgcatttatgtatctgggcgagctgatcgagttcagtgatactgataacctgttcactgcgccgcagaaaaagcagactgaagactacatcactggccgttatggttgataggaagcatcatggataacctgaatttaaacaaacacatttccggccagttcaacgcagagctcgagcatatccgcacccaggtgctgaccatgggcgggctggtggagcagcagctgaccgatgccatcaccgcgatgcacaatcaggatggcgagctggccaagcgcgtgatcgaaggcgacgccaaggtcaacatgatggaagtggcgatcgacgaagcctgcgtgcgcattatcgccaagcgccagccgaccgccagcgatctgcgtctggtgatggcgatcatcaaaaccatttccgaactggaacgcatcggcgacgtggcggacaagatctgccgcaccgcgctggagaagttctcgcaccagcaccagccgctgctggtcagcctggagtcgctggggcgccacaccgtgcagatgctgcacgacgtgctggacgcgttcgcgcgcatggatctggacgaagcgatccgtatttatcgtgaagataaaaaggtcgaccaggaatacgaaggcatcgtgcgtcagctgatgacctacatgatggaagattcgcgcaccattccgagcgtgctgaccgcgctgttctgcgcccgttctatcgagcgtatcggcgatcgctgccagaacatctgcgaatttatcttctatttcgtcaaaggacaggatttccgtcatttgggcggcgacgccctggaaaagctgctgtctccgggcggtaaagacgaaaaagacgactaaccctttccgggtaatatccttccaaggcgcggtttcccgcgcctttattccatcttaagtgcgtaaagataaaaaggttataaatatagctttttatattatttcctgacctatgtggcgcttgctagcttatccgccagcaggacatcaaccacttaggagctttctatgaaacatcgcgctttggccttaacgttgttagccagtctgaccggtttcgccgccggcgccgcgcacgcggacaaacttgacgatatcaagcaagccggcgtggtgcgcatcgcggtgttcgacagcaatccgccgttcggttacatcgatccgcagagcaagaagctggtgggctacgatgtggatgtcgccgacgcgatcggcaaagcgctgggggtgaaagtggagctgcgcgccaccaacccggccaaccgcattccgctgctggtgtcgaagaaggttgacctgattgccgccaacttcaccattaccgacgagcgcgccaaggaagtgaacttcagcgtgccgtatttcgccaccggccagaaattcatcgcccgcaaaggcgtattgaaaaccccggaagacatcaagaagctgcgcatcggcgcggacaagggcacggtgcaggaaatcaccctgcgcgagcgtttcccgacggcgaaagtgatctcctacgatgataccccgctggcgttcgtggcgctgcgtaacggcaacgtgcaggcgatcactcaggacgacgccaagctggtcggcctgctcggcaacctgccggcggcgcaaaaggcggagtttgaaatttcgccgttcagcctgaccaaagagtatcagggcgtcggcattcccaagggcgaagatcggctgaccgccgcggtgaacgagacgctgatcaagctggaaaaagacggtgaagcggttaagatttacgatcgctggttcgggccggaaacccaatccgcccagccgcgcggcgatttcaaaatcgcgcctttggatcagcaaccgaaagcctgatttaaccgcgcgcggtgagatcggtacggaggggcgcagcttgctgcgcccctgatgcattctgcaagacaaggattgaacatgaatctggactggctgctggcgccgcaatacctgagctggctgtggcacggctttctgctgacgctgtggctttccgcctgcgcgggcctggcggccacgctgctgggcttcgtgctggcggcgatgcgcgacagcagcctgcggccattgcgctggctggcgatgggctacagctcgctgtttcgcaatacgccgctgctggtgcagctgttcttctggtacttcgccgccgggcagatcttgccgtccgccgccatgcagtggctgaacagcgcccatcagatcggcccgcttgagtggccgtcgttcgagtttctcgccggtttcttcggcctgacgctctactccaccgcctttatcgccgaagagatccgttccggcattcgcggcgtcgccggcgggcagaaatatgccgctcaggcgctggggctgaccggctggcaggcgatgcgctacgtggtgttgccgcaggcgctgaaaatcgcgctgccgccgctgctggggcaatacatgaacgtgatcaagaactcgtcgctgaccatggcgatcggcgtggccgaactctcttacgcctcgcgtcaggtcgaaaccgaaaccctgcgcaccttccaggcgttcggcgtggcgacggtactgtacatcgccatcatcgcgctgctggaaggctggggcatgtggcgacaacagcgtaaaccgctgggagggcattgagatggatttcagcgtgattcacgacaacctgggctacctgctgtggggcacctggccggatgggccgctgggcggcgcggcgctgacgttggcgatcagtctgatggccggggtcgcctcggcggtgctcggcaccctgctcggcgtggcgctggcgatgtcgcgcggcatcgccgccgggctgctggcggcggtgttgggctttttccgcgccattccggtcatcatgctgatcttctggacctatttcctgctgccgatggtgtttggcgtagagatcccggaaatcaccaccgtcgtgtgcgcgctggcgctgatcgcctcggcctatctggcccatgcggtgaaagccggcatcgccgcgatcggccccggccagtggcaggccgggctctctctggggctgacccgctggcagacgctgcgcatgatcgtgctgccgcaggcgctgcgcatgatggtgccgtcgttcatcaaccagtggatctccctgatcaaagacacctcgttggcttatatcgtcggcgttggcgaactgaccttcctggcgacccaggtcaacaatcgcagcatggtctacccgatggaagtgttcctgttcgtggcgctggtttatttcgtgttttgcctggcgctcgatctgctggccaatgcggtcaaccgccgcttcggcgcgcaaacccgcgcgctgaaacggtcctggcgctggtggcgcaacaagccgccgttgccggccagttaatcggccgtcagccgccagccgcgttcgcgccacagcgtgggcaattgagccaggtcgtcaaacgttgtcaccagcgggtgatcgatcggcgggttatgcggatcggcgcagaagtaaaagaccgggataccggcattgatgccggcctgcgcgccggcgggcgagtcgtccaccaggatgcagcgcgtcaccggcacccgcatctgttcagcggcgtgaaacacgatcgccggatccggcttccagcgctgaatgtcatagccgctgaacaaccggtcatcaaaataaggcagcatgccggtcaggccgagcgagtgctgcatcttgctgaccggcccgttggagacggtgcagacgggcaccgtcacctgcgccagcagctcgcgggcgccggcaatctgctgcagctcgctgtcgaacaaccgcgccacttcctgccgatacagcggctccagcgtctcttttgccaggtcagtgccctgctcggcgttgacccgatcgatgatctcgtacagcttcacccctttgtatttcttgaacacctcttccagcgacagatgaatgccgtagcgggcgaacatgtgcacataggctttgctgcacagcacttcgctgtccaccagcgtgccgtcgcagtcgaacaaaatgcagtcaatctgattcatgcgggacaggttccttcgggttaacgccgctgaggcgactcagcgatcacttgatcaggttacgcgccttgagatcgtgcaaaatcagcgcggcgacgtgtgagcactgcggcagatcgcggctgtcgcaccacttcagctcggcgatttcggcggccggctgcaactgcccggtaaagccggcctggtagcagcgaatgcgcacctgggtgccgtcctgcttgccgtctgccgggccggagaactcgccgtaaaacgcgatggagttcggctgcagcgcgacggtcagctcttcgtcgatttcgcggcacagcgcctgttcgtcggtttcacccgcttcgcgctttccgcctggcatataaaacagcgtcttgttgtgtgagcgcaccagcgccactttgtcatctttcagcgcgatcaacgccagcttatcgataaaggtcgaagacatgcggattcctgtttgttaacggatagggaaagagggggcgataggccattttatcggccgtgccgacaaacggcaacgcagcgggcggtcgggggatgaatgtctgtaaatacaagccgttgacgcatttagccgtaaagacggcgaaaaaaacctgtgaccggcgtcaaaagccccactttttgttataggatagccggcgactgtccattcccattttcggaattctgataatgaccaaaccagtatctggccttgacgctgagcaaggcttgcttgggcgcgtgtttaaactcaagcaacatggcacgacggcgcgtacggaaacgattgccggtatcaccaccttcctcaccatggtgtatatcgtgttcgttaacccgcaaattttaggcgcggcgggcatggatacccaggcggtatttgtcaccacctgtttgatcgccgccttcggcagcatctttatgggcctgctggcgaacctgccggtggcgttggcgccggcgatggggctgaacgctttcttcgccttcgtggtggtcggggcgatgggcatctcctggcaggtgggcatgggcgccatcttctggggcgcggtcggcctgctgctgctgaccattttccgcattcgctactggatgatcgccaacattccggtcagcctgcgggtcggcatcaccagcggcatcggcctgttcatcggcatgatggggctgaaaaacgccggcatcgtggtggccaacccggacaccctggtgaccatcggcagcctgacctcgcacaacgtgctgctgggggcgctcggcttcttcattatcgccgtgctctcttcgcgtaacttccacgcggcggtgctggtgtcgatcgtggtcactaccctgatcggctggatgctgggcgacgtgaaatacggcggtctgttctcgctgccgccgagcattacctcggtggtgggccaggtcgacgtggccggcgcgctgaacatcgggctggccggggtcatcttctcgtttatgctggtgaacctgttcgactcctccggcaccctgatcggcgtcaccgataaagccggcctgaccgacaaccagggtaagttcccacgcatgaagcaggcgctgtacgttgacagcatcagctcggtggccggttcgctggcgggcacctcttccgtgaccgcttatatcgaaagctcatccggcgtcgccgtcggcggccgcaccggtttgacggcggtggtcaccggcctgctgttcctgctggtgatcttcctgtcgccgctggcgggcatggtgccggcgtatgccgccgccggcgcgctgatctacgtcggcgtgctgatgacctccagcctggcgcgggtgaaatgggacgatctgaccgaagcggtgccggcgtttgtcaccgcggtgatgatgccgttcagcttctcgatcaccgaaggcatcgcgctcggctttatctcctactgcgtgatgaagctgggcaccggccgctggcgtgaaatcagcccgtgcgtggtggtggtggcgctgctgttcgtgcttaagatcgtcttcgtcgacggccattgacagccaaagggccgacggcggtcggccctgaatccctagacgcccggcgtcgcatccggcgcctgatccaacacccactgcaacggccgtctgaagcgcgcctgccagctgccggcggcatcctctccctgggcgaagtgcagcgtctgcacctgattatcctccccgaacagattggcgaagtgcaacgccagcgcctgctcgctgaaggtctgccgatcgtaatacgccatcacgattttctttttcgccgccagcgactgctgggccggcttgatctcgccgtggggggcgatcaggagcgcgccggcgtaaaactgtgggtacttcgcgagcaggttagcggcatgcagcgcgccctggccgcgggcgctgagataaatccgccggggatccagctttagctgcggagccagctgttgcaccgtgcgctgcagggcggtttgggtgctctcgtcgctgtaatttgaccagcggaagctgttttccgacagcatctgcgtgccgttgatctcgatgtaggccacgcccatttcgccgaacagcagccgctcctcggggctgatggcggcggctttgccgtaggtatgcaggaagatcaccgttggccagcctgcgggcggcgcttcgccgtccggcaccgcgtagctggctttgccttcatactgacgggcgtgctgcagatagcgcgctttggtgacggccaaaatggattggtaagtggcggagtgttggatgctgttgaaggcgtcgtcctccagcaggttgtagtagtaccacaggccgcggtcggcgctcagctgcaggtaacgctccgccagttcggtttgccctttctccgccgacgacaccgccagctggtagggcgcccagacgttgcggccgtcttcgcgcatcagcgtcaggtacagcgacatggcgccgagctttttgtcttcctgggtttgcgcggaacgcgacagttgggcgttgagcgcgctgtgcgccggcagctccagcggctcttcaccggcgggataacgcatgtctgcggcgaaagcgggactggtgatggaaacgaaaaataacgctaaaatgaaaaaatacatgatgctatggctttaatttcaataaattgacggacgtcatgtcctgttgcggcgcccagcgggcgccgcgagaccttcactccacgcggcgaataaaatcgctgaacgcggacagctggccggtcaggaaatccagcgttccctgatcgctcagttcaccggcctgttcatcgaccttgctctggatcacgccgcccataaactcaggcttgttcattaccatcgcatcgaggaacaccaggatctggcgcagatggtattggcagcgcgcgccgccgatcggccccattgagctggtttgaatggcgaccggcttgccggccagcggctgattcggtacgcgagacagccagtcgatggcgttcttcaacccgcctggtacggaatagttatattcaggggtgacgatgatcacgccgtcggcctggcggatctgctcggcgatcgcctcgaccgcggcagggaagccttcaccctgttgcatgtcggcgtcgtacagcgggatatcgcggatggagggcagcgcttcaatggtgacgccctgcggggccaggccaggcagggcgcgggccaccatggcgttgtaggagcctttgcgcaggctgccgagtagagtgacgatttttaaggcttggtctgacatggtgattctccctttcgaatgagcagattcagcgtacaacatgggcgaatagtaggctaaagcgcgggtcgagaataggcgattgctcaacatttagctgtctttacaatttaatccagtaactcgtgcggtaaagaccgcgttatccgctttgcgccgcgtcaacctggcgtctttaggcccgtcagtttaacgaagcgtgaggatgccgccgggctgcgcggcgagatttccccgtctttgtgcaggccgccgcgctcttcgtagcgccagcacagcaggcgatccagcccggggctgccggcgcaggcccagctcagatattcgtcggcgtcgctcatcacctgaacgtccggcgtggcgctggagcgcaggtggccggagaagggatgcagacgcagcgtagactggccgctgttgccgaggccggaaattttcagcacgctttgccgaatgctccacagctgagtttccgcctccagccgatcgtcctgcgcgccgatccaggcgctttccgccggcgtctggtgcgcgttctgcagcgcgctttgccggctgccgcgcgcccgcatcacttcgatatccagtccgactttgccttcgtcgctgagcagcacgcccacggtgttgctggcataggcgaggctaaaatcgggcagctgatgatcggcgaagcaggggcggccggtgggcgtggtggctatagggggaagcgtcggcaggccgtacaggtagaacatcatttcggcgagcagaatgcgcccttgcaggtagcgcgtgcggcgcttaacggaaaaggtgcgggtggcggctatcacttcgtcggcgagtctctgggtatccaggacagcggaggccggggtccatcgggcaaaatgacacgccattgttcactccatgacagagagtcgctaagaacgcaggggtgttagattaagactaagttgaggatttatcatcaaaaaacactatgcgttttatccgatttgttggctttgcgctgtataggcggggggagaagatcgtacggacctgaataggtgcgtgcacaaaattaatcagttccgaaaccaaccacatccgaatcgacggcgtccaatgagcctataaaagtagctatcagacaagaaagagttggcggagagagcaggattcgaacctacgacacgataactcgtgtggatttaagaaacggttagtttcttaaatctggcttaaaccactcgcccacctctccgcattcgtttgttggaaacataaaaccacaaaataaaaatggttaaaataacctaaacttggaaatgtgactaaagccacaaaagccctattttatatgtgtgtttgttaattatcggagtcagatcactaaatttacattagctattgttataaaaagttggcgtcattggctacgaatagggaagaagggcatgccagatctcgagttaatgccgctgcaaagcgccgaattttataagacagctgaacgtgttgtttttaaagaatataaatgcaactgcaaaaaaggttggaagggcgaagatcgctttatcgtctacaaggccgatcagaatggaatcattgaggtcgtcaacaatgaggtttcaaataataacctcgaagagctcatcgcgctggcatcgtcttttttgacggataaggtggtgatttccggcgggcataccgtggttaatttggacgatcgtttttctgtcagcagtgaagtggaaaagtccgcgcgattctgcattgactacatagccgaatccatccgacagctcaacgttcagcctgacttcttgatggaaataaatgatttctatatggaaaaaaacgatggcagcgagatagacggcgctaacgaattcaggaggatggcgacatctccgtatattattccagaaaaaataaacgactacattctggcgtcgaatcaacgtcataacattgatatcaatgcattttatgtcagtgagaaaaacatggcggatcgctttaaacgccacattaaaaaccgtatggataaagaggcgtattttcagcgccaagacggtaatgtgaagatggcggtgggagagcacgagttcgatatcatcaaggaaaataaaccgacctgtgcggcgggcaatgccgcgacgttcagggctattcggtatcgtatttcctctaataaagtcttcgataattacacgtcgcatattggcgtttttccgctgtgttcacgcgttaacgtacttaacggctatcgcgcggccgcgactttttacgataacttttccttgccttccttactggttttcttcggaagatcatgttttgaatgacattttttgtgccagctggctatgtgtcgctgcatagccatgatggtcgagcattatcatgaaaatttcacacctgtattggccagtcactttcttctccacggcattcggcgccgggattttctttttgcctcaggcggtggggccgggcgtgctggggatgaaggcgttcatgctgtttatcgtcatcgccatgtcggtatcgatgatggcgcactatctttttttcaaattcatcatctcgcacccgcagaaagatttcctggcggcatcgtcgacgtttatcggtgagcgggcggcggcaatcgtctgtgtgctgtttattctgtcgatgatcattatcgtgctgataaatttcatcaccctggttaacgtggtcgcgtcttttctccacgatggattttgggttcggggcggtgtttcgctgttgctgagtgcggcgctgtcggccgcatggctggcatttagccagcgaatcgagcacttgatctccagaatggcactggtttctatcgttctggtggcgatccttacgctgtttttcctgttacaacctgcaggggctcagcggacgcctgcgccgccgagcatttcattgcaaacgttggtgctgctgcctatttttctttttacgtttaactttaccccgtgtatccagcggtttgcgcaaagtgccgtgcggccgcaggcgcgcagtattctgttcggcaagatactgatcctggcgtttatcgccatgatcgttatcgctatcagtcgcttgctgacgttggatgatatctcgatcattaacggccgcaatgtggattcgctgttttataccgcaggtttgaccggtaactcgatggcgtggttaggcgcagccctgctgctgtgcttgctcaccggcggcgcttatatcggcaccttgaccggggtcatcgacggtattacgtccttcggcatggcgggaaaaaagggcatcatcgcggggaacattgttgtctgtacgcttatcggcacgattaatccgagcatcatcaagatcatctcaagctggtcgatacccgttatcgtgatgaccgtctttttcatcccatcactgtattttttacagcggggcgacggccagcaaaagatggtaggaatagcggtgctgtgctgcggcatcgcggtgatagcgacgctattcgtgtaaagcggtacgtctaagccagaatcagcgtatcgccggtggccggcgcgatcccttccggcagccatagccggccccacgcgccggtacagtggcaacccatgatcttttccggctggtgctgccgtaaaaaacggcggacgcgccagagcgtccgcggggaagcgcaacgcagatgaaaaccgccaatcaaggcgtggatccgatcgataccggtgattttctggcagtggcgcacgatattcacgatcccgcgatgcccgcagccggtcacgatcaccagaccgcgatccgatttgtaaatcagcaccccttcgtcgataacgtaatccaccgccgcgttttccccggtaatcaccccgtaggcgcgcggtgcgggcacggcgatttcacctgaccacataaagcgatcgccgatcgccagcggttcgcgactgtagtgcatgttatggcgcgagtagtcgatgtccaaagagagctttttgattttgtgggtgtggcccagcaccttcagcgccgcatagcgctcatcgccgacctgcgggtggcagatgatgcggctgttgtccggcagccaggcgacgccgccgcagtggtcatagtggccgtgggagagcaccgccgcggtgatgcgggagagatcgacgcccatcagcgccgcattgtgcaggaagctgtcgtcggggccggtgtcgaacagtatggaggtcgtctcgtcttcaatcagcaggcttaacccggccttggcctgcaatagcgggttggcgccggcggcgcggcggttttccagcaataccttgagggttaacgccatgttgactcgttcctgagaaagacacctgaccgtccagtatatcgcgggcagttgcggcggcgctgtgagccagcgcgcagagcgagagcgggaaagaaaaacggccggaacaagggcttatcccggccgtgaaggcctctggcagcgcgttatttcccgatacagaagctggagaagatgcggcccagcaggtcgtcggaggtgaattcgccggtgatttcgctcagggccagctgcgcctgacgcagttcctcggccagcagctcgcccgcgtaagcgctcactaactgttctttgccctgcaccagatgctgcgccgccagttccagcgcctgcaggtggcgacggcgcgccaggaagccgccttccatgttgctggtgaagcccatgctctgtttcagatgatcgcgcagcacatcgacgccttcgccggtgcgggccgacaggcgaataagtgagtggttattcacttccgtcaggcccagcgtttcaccggtgatgtcggccttgttgcgcaccacggtgatcggcagcgtgcctggcaggcgcgccataaactccggccagatctccgccggctcggtggcggcggtggtggtgccgtccaccataaacagcaccctgtcagcttgttcgatctcgttccaggcacgttcgatgccgatacgctccacttcgtcgctggcgtcgcgcaggccggcggtgtcgatgatgtgcagcggcatgccgtcgatatggatatgttcgcgcaagacgtcgcgggtggtgccggcgatatcggtgacgatcgccgcctcgcgcccggccaacgcattgagcaggctggatttaccggcgttaggacgcccggcgatcaccaccttcatcccttcgcgcagcaggctgccctggcgcgcttcaccgcgcacgttgtccagatccgccatgacgtcgttgagctgcgcctcgattttaccgtcggacaggaagtcgatttcctcgtccgggaagtcgatcgccgcttccacgtagattcgcaggtgagtgagcgcttccacgagctggtggatgcgggtggaaaatgcgccctgcagcgagttcatcgccgaacgcgccgcctgctcggagctggcgtcgatcagatcggcgatcgcttcggcctgcgccagatcgagtttgtcgttgagaaacgcgcgctcggagaactcgccgggccgcgcaatgcgcacgtcgggcagcgccagcacgcgcttgagcagcagatcgaggatcaccggcccgccgtggccctgcagctccagcacgtcttcgccggtaaaggaatttggccccggaaaccacagcgcgatgccctgatcgagggtggcaccggcggcgtcgcggaacggcagatagtcagcgtagcgcggcttcggcagcttgccgagcaacgcctgggcgacgtctttggccttgcttccggaaatgcgcagaatgccgacgccgccgcgtcccggcggggtggcttgggctacgatggtatcggtggtgctcataacggttctctctgacgattaagatgcaaaaaggcggtctaatgaccgcctttggtgtgactgcaagggtcggcgcgccgaacccctacactacgcttagctttttttcttgtcgcggctgtgcagaccgcgtttttccagaccacggtaaatcagctgctgctgcaggatggtcaccaggttgctgacgatgtagtacagcaccagaccggacgggaaccacaggaagaacactgtgaagatcaccggcatgaaggtcatgattttctgctgcatcgggtcagtcacggtggtcggcgacatcttctgaatgaagaacatcgtcacgcccatcaggattggcaggatgtagtacgggtcttgcgccgacaggtcatggatccacagggcgaacggcgcgtggcgcagctcgaccgaacccatcagcatgtagtacagcgccaggaagatcggcatctgaatgatcagcggcagacagccgccgagcgggttcactttctccgccttgtacagcgccatcatctcttggctcatgcgctgtttgtcatcgccgatgcgctcgcgcatcgcctgcaacttcggctgcagcatgcgcattttcgccatcgaggtgtactgcgccttggtcagcgggtacatgatgccgcgcacgatgaaggtgatgatgatgatggagaagccccagttaccgataaagccgtggatgaacttcagcagtttgaacagcggctgggagatgaaccagagccaaccgtaatccacggtcagatccaggtgtggcgccagctgagccatctggtcctgcagctccgggccgacccacagggtcgcgttcagctgttgctgagcgcccggctgcaccacgaccggtgtagatttgaagccgatggtggacaggttgtcacccggtttggcggtgtagaaggtgttgtcacccttggtcgccggcacccacgcggtggcgaagtactgctgcagcatcgcaacccaaccgtctttggtggtgacgctcaggttttcgtctttgtcgaacgcgtatttctggtacttgtcctcgctggacgagtacgccgcgccgcggaaggtgtgcagcgcgaagttgctgctgccggtgtcacggtgcttaggcaattcggtggtctgcttcagctggccgaacagggtcagctccagcggcgtcgcgcctttgttgtcgatgctgtaatccacgccgaccgcatagtggttgcgtttgagcacgaaggtcttggtgtagatcgcgccgtctttaccggtgtaggtcagcgggatgcgcagctcgtcctggccttccggcagggtgtagctgtcttgcgccgcctgatacagcgggcgttcgccgttggccgggttgtccgggccgtttttaccggtcaggccgctttgcgcctgatagacgaacgacggggtggtttccagcagttggaacggagtcgatgaacccagagtttccgggtaggccaacagtttagcctgctcgatatcgccaccacgggtgttgatggtcagtgacagcacgtcggtgttcacggtaatcagcttaccctgaccactggctggcacggcctggctggcggcatcaccggctactgcgttcgaagtctgttgcgtggtctgtgcggccggctgcggagcgttgtccgtttgccatgcctgccagatcatgaaagacacgaacagcagagcgatgagaagaagattgcgttgcgaatccatcgttagtgttctctgttatcgtcggtttttggcggcaccggatcatcgccacctgggttcaaagggtggcattttaatacgcgtttcaatgctaaccaactgccttttatcatgccaaacctgcttaatgcctcaattgcgtaatgagagcatgtcggctggaagcgacaacgaggccctagcagcgggctgatgacgagctgataggcccgcaccagcccgatcaggatgcgggagcctggcgacagtggcgacgccataatttatccaaagcttccgtcagcgcgcggttatccaaatccgctatcccctttttggccaccacgacaaaatccatcgccggtaattcgtgctggcgcaggcggaagctttcgcgggttaggcgtttgatccgattacgctcgtgcgcgcgtttgacgtgttttttggcgacggtaagaccgatgcggggatgccccagctggttcaggcggccgaggatggtgatttgcggcgtgccagcccgttgtggctgctggaagacgaaagtgaaatgagtgggagttaacaaacgtaactccctgggaaaagcgagcttaaccactcagcgggttagctttattacttagaaacagtcagacgagcacggcctttcgcacgacggcgggccagaacttgacgaccatttttggtggccatacgagcacggaaaccgtggctacggttgcgcttcaatacggacggttggaaagtgcgtttcatagcgatttctacctaaacttaaaataattactgatcagtaaacgcgtttggctactcggcgtgaagatgaccgacgcctcaatcgcaatacataaagaagcgggattgtaataattgtacagtcctgagtcaattcgcatcgcgccagcctacctggttgtctgccagtaacggaacaaaatccgctcttggcccgtggtcaccgcagaatcctgtctggctaatgacgcaccataaggaaccaggtatcacacgtagggcgaagattatacggactcggggtgaaatcgcaaggatccccgtgagatcctttgcgcgcgatcgcaggatccgacgtggataacagggtataaccggttgacaatgtaaaaaatgcggcgcagcggccgggatctgcgcggtcattcggcgccggcggcgaaaagatcgccgccggccgcggcctgtggataaaatggatctaatctgtgaggaaggggaggatctcttgcgcggattgcgctatgatccgtcattccgatcgcgatccctcatgccgggatcgtgagggacacaaaccgtgaaaggcggttcgcatcccccacaggcaaacagccgatgccgggtatgtgtcaaaaatcatgagttataaaaaagttgcccgtttcttttctttattgatcttgttcgagtggagtccgccgtgtcactttcgctttggcagcagtgtcttgcccgattgcaggatgagttacctgccacagaatttagtatgtggattcgcccattgcaggcggaactgagtgacaacaccctggcgctgtacgcgcctaaccgttttgtgctggattgggttcgcgataagtacttaaacaacatcaatggtctgctgaatgatttctgcggcacggacgcgcctttgctgcgttttgaagtcggcagcaagccgatcacgcaggtgatcagccagaccgtgaccgccagcgtcagcagcgcccctgcggctccggcggcgcgcacggccgcgccttcgcgcccgagctgggacaacgcggcggcgcagcccgagctctcttaccgctccaacgtcaaccctaaacacacctttgacaacttcgtcgagggtaagtccaaccagctggcgcgcgcggcggctcgccaggtggcggacaatccgggcggcgcctacaaccctttattcctgtatggcggcaccggcctgggtaaaactcacctgctgcacgcggtcggcaacggcatcatggcgcgcaaggccaacgccaaagtggtctacatgcactcggaacgctttgtgcaggacatggtcaaagcgttgcagaacaatgccatcgaagagtttaagcgctactaccgttcggtcgacgcgctgctgatcgatgacatccaattcttcgccaacaaggagcgttcgcaggaagagttcttccatacctttaacgccctgttggaaggcaatcagcagatcatcctgacttcggatcgctaccctaaagagatcaacggggtggaagatcgtctgaagtcccgcttcggctgggggctgacggtggcgatcgagccgccggagctggaaacccgcgtggcgatcctgatgaaaaaggccgacgaaaacgacattcgcctgccgggcgaagtggcgttcttcatcgccaagcgcctgcgttccaacgtgcgtgagctcgaaggggcgctgaaccgcgtgatcgccaacgccaactttaccggccgggccatcaccatcgatttcgtgcgcgaagcgctgcgcgatctgctggcgctgcaggaaaagctggtcaccatcgacaatatccaaaagacggtggcggagtattacaagattaaagtcgcggatttgctgtccaagcggcgttcgcgatccgttgcccgcccgcgccagatggcgatggcgctggcgaaggaactcaccaaccacagcctgccggaaatcggcgatgcgtttggtggccgcgaccataccacggtgttgcacgcctgccggaagatcgagcagttgcgtgaggaaagtcacgacatcaaagaagatttctccaatttaatcagaacattatcttcatagcgctatgaaatttatcgttgaacgtgagcatctgctaaaaccgctgcaacaggtgagcagcccgctgggcggccgcccgaccttgccgatcctgggcaacctgctgctgcaggtgacggaaggctccctgctgctgaccggcaccgatctggagatggagatggtggcgcgcgtcgccctgtcccagccgcacgagccgggcgcgacgactgtgcccgcgcgcaaattctttgatatttgccgtggcctgcctgaaggggcggagattgccgtcacgctggagagcgagcgcatgctggtgcggtccggccgcagccgcttctcgctgtccacgctgcccgcggcggacttcccgaacctggacgactggcagagcgaggtggagttcaccttgccgcaggcgacgctgaagcgcctgatcgaagccacccagttctcgatggcccatcaggacgtgcgttactacctgaacggcatgttgtttgaaaccgaaggcgaagagctgcgcaccgtcgcgaccgacggccaccgcctggcggtgtgctcgatgccgataggccagcagctgccatcgcattcggtgatcgtgccgcgtaaaggggtgatggaactggtgcgtctgctggacggcggcgactcgctgctgcagctgcagatcggcagcaacaacatccgcgcccacgttggcgatttcatcttcacgtccaagctggttgacggccgtttcccggactatcgccgcgtcttgccgaagaatccggacaaaacgctggaagccggctgcgatctgctcaagcaggcgtttgcccgcgctgccattctctcgaacgagaaattccgcggcgtgcggctgtacgtcagccagaaccagctgaagatcaccgccaacaacccggagcaggaagaggcggaagagatcctcgacgtcagctacgacggcgcggagatggagatcggcttcaacgtcagctacgtgctggacgtgttgaacgcgctcaagtgtgaagacgtgcgcctgctgttgaccgactcggtctccagcgtgcagatcgaagacggcgccagccaggcggcggcctacgttgtcatgccaatgcggttgtagtctcgttaccttgaattacagcaccgtcatcggtaaagagattgcatggctctgacgcgtttattgattaaagatttccgcaatatcgaggcggcggatttggcgctggcgccgggattcaacttcctggtcggcgccaacggcagcggcaagactagcgtgctggaggcggtgtatacgctcggccatggccgcgccttccgcagcctgcaggccggtcgggtgatccgccacgaccaaccggagttcgtgctgcacggccgcatcgaaggcgcggagcgcgagctgtcggtaggattgagcaagagccgtcagggtgacagcaaagtacgcatcgatggcagcgacggccacaaggtggccgagctggcgcagctgctgcccatgcagctgatcacccccgaaggttttaccctgctgaacggcgggccgaaattccggcgcgctttcctggactggggctgttttcataacgaacccggttttttcaccgcctggagcaacctgaaacggttactgaagcagcgcaatgccgcgctgcgccaggtgagtcgctatgcgcagatccgcgcctgggatcaggaactgatcccgctcgcggagcgcatcagcgaatggcgggcggaatacagcgacgcgatcgccgcggatatcaccgcgacctgcgcgcagtttctgcctgaattcgccctgagcttctccttccagcgcggctgggacaaagagagcgactacggcgagctgctggagcgccagtttgagcgcgacagggcgttgacctataccgcggtggggccgcataaagcggactttcgcattcgtgccgacggcacgccggtagaggatttgttatcgcgcggtcagcttaagctgttgatgtgcgcgttgcgcttggcgcagggtgagtttctcacccggcagagcgggcggcgttgcctgtatctgattgatgattttgcctccgagctggacaccggccgtcgccggttgctggccgatcgcctgaaagccacccaggcccaggtttttgtcagcgcggtcagcgctgaacaagtgaccgacatggccggtgaaaagggcaagatgttccgcgtggaacagggtaaaatagaggttcaaccacaggactaaaatgagcgagaaacgttgatgtcgaattcttatgactcctcaagtatcaaggtattaaaagggctggatgcggtgcgcaagcgcccgggcatgtatatcggcgacaccgatgacggcaccggtctgcaccacatggtattcgaggttgtggacaacgctatcgacgaagcgctcgcgggccactgtagtgacattcaggtcaccatccatgccgacaactcggtatcggtgcaggatgacggccgcggcattccgaccggcattcacccggaagaaggggtttcagccgcagaggtcatcatgaccgtgctgcacgccggcggtaaattcgacgacaactcctataaagtttccggcggcctgcacggcgtgggcgtctcggtggttaacgccctgtcggagaaattggagctggtgatccgccgcgaaggcaaggtgcacgaacaaacctacagtcacggtgagccgcaggcgccgctgaacgtggtgggcgaaaccgaacagaccggcaccatggtgcgtttctggccgagccaccagactttcaccaacgtgaccgaattcgagtacgacattctggccaagcgtctgcgcgagctgtccttcctcaactccggcgtgtccatccgcctgaaggacaagcgcaccgaccgtgaagatcacttccattacgaaggcggcatcaaggcgtttgtcgagtacctgaacaagaacaaaaccccgatccacccgaacgtgttctacttctccaccgtgaaagacgacatcggcgtggaagtggcgctgcagtggaacgacggtttccaggaaaacatctactgcttcaccaacaacattccgcagcgcgacggcggcacgcacctggtcggtttccgtaccgcgatgacccgtacgctgaacagctacatggagaaggaaggctacagcaagaaggccaaggtcagcgccaccggcgatgacgcgcgtgaaggcctgatcgccgtggtgtcggtgaaggtgccggatccgaagttctcttctcagaccaaggacaagctggtctcttccgaggtgaaaaccgcggttgaaacgctgatgaacgagaagctggtggattacctgatggagaatccgggcgacgcgaaaatcgtggtcggcaaaatcatcgacgcggcgcgcgcgcgcgaagcggcgcgtaaagcgcgtgagatgacccgccgcaaaggcgcgctggatctggccggcctgccgggcaagctggcggactgccaggaacgcgatccggcgctgtccgaactgtacctggtggaaggggactccgcgggcggctctgccaagcaggggcgcaaccgcaagaatcaggctatcttgccgctgaagggtaaaatcctcaacgtcgagaaagcgcgtttcgacaaaatgctctcttcgcaggaagtggcgacgctgatcaccgcgctgggttgcggcatcggccgcgacgagtacagcccggacaagctgcgttatcacagcatcatcatcatgaccgatgccgacgtcgacggttcgcacatccgtacgctgctgttgaccttcttctaccgccagatgccggaaatcatcgagcgtggccacgtgttcatcgcacagccgccgctgtacaaggtgaagaaaggcaagcaggagcagtacatcaaagatgacgaggcgatggatcagtaccagatcgccatcgcgatggacggcgctacgctgcacaccaacgccagcgcaccggcgctcggcggcgagcagttggaaaaactggtggccgagcactacggcgtgcagaagctgatcggccgcatggagcgccgctacccgcgcgcgctgctgaacagcctgatctatcagccgacgctgaacgaaggcgatctcagcgatgaagccaaggtgaagacctggatcgcgtcgctggtgcaggcgctgaacgacaaagagcagcacggcagcagctatgacttcgtgatcttcgagaaccgcgaacgccagatgttcgagccggcgctgcgcatccgcacccacggcgtggataccgactacaagctggacttcgacttcatccacggcggtgaataccgcaagatctgccagctgggcgagcagctgcgcgggctgatcgaagagggcgcgttcatcgagcgcggcgaacgccgtcagccggtagacagcttcgaacaggcgctggagtggctggtgaaagagtcgcgccgcggcctgtcggtgcagcgttataaaggtctgggcgagatgaacccggagcagctgtgggaaaccaccatggatccggaaagccgccgcatgctgcgcgtgaccgtcaaggacgccatcgctgccgatcagctgttcaccacgctgatgggcgatgcggttgaaccgcgtcgcgcctttatcgaagaaaacgccctgaaagcggcgaacatcgatatctgatgcgttaatggctgtgaaaatccgcgccgggcgacccgcgcggattttttttggccttttttggcgctgacagccgaggctgaaacgcgttagcatgaataaaaaccactgggagaagcgttgaatggctattgaactgattgcgatcgacatggacggcacgttgctggatccgcagcatcaaatcacgccggcggtaaagcaggctatcgcggcggcgcggcgcaaaggggtgcacgtggtgctggccaccgggcggccttatgtcggcgtgcaggactatctgcgccagttggacattcagggccccggcgatttctgtatcacctataacggcgcgctggtgttgcgcgcggtcgacggcgcctgcatcctgcaggaaaccctgggcttcgaggattatctgcacttcgagcagatggcgcgcgggttaggcgttcacttccaggcgtttgatttcgataccttgtataccccgaacaaggacatcggcaagtacaccatacacgaggcggaaatgaccggcattccgctgaaataccgcagcgtggaagagatggatcgccagatgcgttttccaaaagtgatgatgatcgacgaaccggcgctgctggacagcgccatcgcgcgcatcccggaggaaacgcgcgcgcgttacactatcttgaaaagtgcgccttactacctcgagatcttacataaaaacgtcgataagggcgccggggtgaaaatgctggccgagcacctcggcgtggcgcgggaaaacatcatgacgctgggggatcaggctaacgatacggcgatgatcgaatatgccggcgtcggcgtggcgatgggcaacgccattcccgagctgaaagcggtggcgcagtttgtcaccagcgccaataccgaagacggcgtggcgcgcgctatcgagaagttcgtgctcaacgcctgagaaaacggggcgctgcggcgcccctttatactttcgccaacacccctttggcgatctgcagatcctgaatcgccaagccggtgagatcggcgatggtgatgtgctgcggctcgcgtcgtacccgcccgccctgcgccaatgcggcgcccatttcgacgatcggcgttgaagtcagcttgttctgccgataagccgtcgcgatctcgccatagtctgtgcactgagccagcgcatcgaccagcagcgcgtccgcgcgggccaccagctcggtcgccagctcctgcttaccgggcgcgtcggcgcccaccgcggtaatgtgcgtgccgggccgaatatccgccgcctgcaaaatcggttcgcggctgggcgtggtggtgacgatcagctgacagtgcgccgccagctccgccgcatcctgcgtgacccgcacccgaaaaccctcagcctcggcatcgcgccgatacgccgccagcgcctgttcgttgcggccccacacccatacctcgcggcaatcggtcaccggtttcagacattgcagctgcagccgcgcctgcaggccggtgccgaccatgccgatcgcctgaatacgcggcggcgcgcacagctcggcgacgatgcggccggccagggcggtgcgcagcgcggtcagccaaccttcatcttgcagcagcgcctgcggctcgccggtctgggcggagaacgccatcatcagcccctgattgctcggcaggccgtgttcggcattgcggtagaaaccggtagagatcttgaccacgaacagtttgtcgcctttcaaccaggcggacttgatgcagcagtcgccggcggcctgctcgaacaggaaatgctgcaccggcggctgttgcacccgctgttgcgagtaggcgataaaaccctgcttcagcagcggcgtaatggcctcggcgtcgaacgcggcgaggatttgctgctgattaaggatgcgcatcggcgatggccttgaggtatttctccagcacgatgtttttaccgcacagcaccaccgccacctttttacctcggtattccggcgccagtttgatcgccgccgccagcgccacgccggccgcgccttcgataatccagcgatcgctggcggcgatccggcgcatcgcgtgtttgatctccgcctcgctgaccagcactttacggtcaatcagctgctggcacagcgggaaggtcacggcacccggctcgacgccgccggcggtgccgtcggacagggtttcttgttcttccaccgagaagatatggccggcttccagcgcgctgtacaggctggtggcgttttccggccagcaggcgataagctgcgtgttcggcgacagttgccgcaaaacggtgccgatgccggcgatatagccaccgccgccgaccgccacgaacaccgcgtcaagatcggcgagttgttcaaccagctccatgccgcaggtgccctggccggcaatgacctgctcgtcgttatacggcgagatgtaggttttcccctgttcgcgtgcggcttgttcccccgccagttcggcgttcagcgcgtcgcccggcaccaattccacggtgccgcccagcgcccggatggtgtcgagcttgatgctcgccgccgtctccggcgcataaaccgtgacgccaacgcccatccgttgccccgccagggcgacagcctggccgtggttgccggttgaggcggcgatcacgccgcgccggcgttgctcgttatccaacagccgcagcttgttgctggcgccgcgaaatttaaaggaaccggtgtgctgcaggtggtcgcatttcagatacagctcgcagcccaactgctgagaaagcagcacgctgcgctccagcggcgtgacccgcacctgagggcgcagttgctgatgagcggaaacaatggcatcgaagagggtgttcataccggctccagaagatttatttggacttaaaaatccagtttgtacttttttgtattgattgtaaaccctacccacaaccgtcggtcaaaaccggtcatggcattgtgtgatcgcgcttacggctaaaaataatcgttaaattatagtttaacggcacgattttttatttatttgcgttaaggaagtcgcagtctctcatttatttttaattagggaacgataatgaaaaaaatattgctcgcttcattaacctatgccgcgctgacgccgttttgtttcgccgccaaggatgtgaccacccagccagaggtttattttctgcaagaatcgcagtcgatagatagcctggcgttattaccgccgccgcccgcgatggacagcatcgattttatgaatgacaaggcacaatatgatgcaggaaaattattgcgtaatactgaacgaggcaaacaggcttataacgacgctcaggttaccggagatggcgttgccgccgctttttccggcgcattcggtacggaaattgcgcaggataaaacgccggagctgttcaagctggtgatgaaaatgcgtgaagatgcaggcgatctggctacccgcagcgccaagaatcactatatgcgcattcggccattcgctttctaccaggaacctacctgtcgcccggatgatgaaggcacgttatcgaagaacggctcctatccttcagggcataccaccatcggctgggcgaccgctttggtgctggcggagatcaatcccgccaatcagggggcgatactgcagcgtggttatgagatgggccaaagccgagtgatctgcggctatcactggcagagcgacgtgaccgccgcgcgcttggtcgcttcggccatcgttgctcggctgcatgcggagcccactttcgctgcgcagttgcaacgggccaaaacggagttcaacgccctgaaaaagtaaccttgcctgcaaacggcggcggcgatatgaaacgctgcgggcgatccggtaagatgacggctcagtgccagcatgtgcaggagagccgccatgagccatcgggaaaaacaactgactttcgaccctcgtgggcatcagttaaccaatatcaacgtctggacgccggacagtcaatggctggcttatgacgtgcgcccgcgcggcgcctctttcaccggcctcagcatcgagcgtgtcaacgtcgccagcggcgcggtggaggtgatttatcgcgcccagcacggcgcccacgttggcgtggtcacggtcagccccgatgcgccggcgcgctatgcctttattcacggacctgagcacccggacagcgcctggcagtatgattttcaccaccgccgcggggtgatcgtcagcgaaccggatcgcgagttggccatcaccctcgacgcgctggatatcaccgcgccctatacccccggcgcgctgcgcggcggcagccacgtgcacgttttcagtccggacggcagccgcctcagctttacctacaacgatcacgtgatgcatgaacgcgatccggcgcgcgatctgcgcaacgtcggcgtggccgtgccgctgcacggggttaatccgccaaaacagcacccgcgtgagtacgacggcagccactattgcgtgttggtcagcgagacggtgccgcagccgcagccgggtagcgatcagatcaatcgcgcttacgaagaaggctggatcgggcgcgaaggctaccgtaaggccgacggcagccggcagcgctgggcgctggcatttatcggcgatacgttgtccgctgccggagagaagctgtctgaggtgtttatcgtcgatctgccggagaacgacgtcgactacgcccgggcgggcgctctgccgctgcaggggacggaaagcgagctgccggcgccgccgcttggcgtcaggcagcggcgggtaacctttaccggggatcgccgttttcctggcgtggctggtgcgccgcgccactggttgcgcagttcgccggacggcagccagatagcttttctgatgaaggacgacggcggcgtggtgcagctgtggacggtgtcgcctaacggtggcgagccgcgccaggtgagccgcagcgagcatgacatccagtcggcgttcagctggcacccgcagggcgggacgatagccctggtgtgcgacaacagcgtgatgctgtgcgaggtggccagcggtcgcctgcagcgtttgacgcagcgcagcgtgcagccgccgtcgggggatgccgtggtgttctcgccggatggcaagaaagtggcgtttatgcgcgagatagcggggttcaaccagatcttcgtggttgaggcgtaaggcgggcctgatgacccgctgcgtgcgcgattagtgcgtggcggtgctgtcgtcgccctggccgggattgccggtcgccgccaaattctgctgctcgctgcgcaggatacgcgcttttggcgagtctgcggtggcgtcgttgccggatcgcagatagtcgtaaggcagcagcacggtatccatcaccgcggagaacggcagatccagcgccaccagcggcatcatcgcccaactggtgttgtcgtccttcagcatgtccacgctggcgcgggtgccgggatagtaaccctgattcgggccggtatggctcatcacgctggagcaaccgctggtcgccaacaacatgcagcccgtcgctatcgctttcatcatcgtcattaatccatcctgcagggttgctgtgcccctaaattaagctgatttataacatcctgttgctgctttaaaagaagcaaaatcccgctctgtggcggctctctcactttagtgtaagtggtaaaaaaaacttttaccttattggtgcaaatttttttgatcctcgcctgttgaattgatgaaagcaacccccattttatcatcagagccgaattgagaattcgccgtaagggaattctggcttaattagcctgtccagagtggaaggcgtatttatttcaacctcgctgaagtgccttaggaggctgttttatgcgtaattttgatctttccccgctataccgttccgccattggtttcgatcgcctgttcaacgcgctggaggctggccagagtcagggcaacggcggttatcccccttataatgtcgagctggtggatgaaaatcattatcggatcgccatcgcggtagccgggtttgccgagcaggagctggagatcaccacgcaggacaatctgctgatcgtgcgcggggcgcacaacaatgaaccggcagaaaaaacctatttataccagggcatcgccgagcgtaatttcgagcgtaaattccagctggccgaacatattcaaattaaaggcgccaaactggagaatggcctgttgtatatcgacatgcaacgcatcgtgccggaaacattaaaaccgcgccgcatcgaaattaaataaatttccgtttcgccggcaggtacgctgccggtaaatatgaagtcatgattagcctgccgtcagggggctgaataaacacatctcgcttaatgaaaggagttgttcctatgcgtaattacgatttatccccgcttctgcgtcagtggattggttttgataaattggccagttcaatgggcggccaggaaccccaggggttcccgccgtataacatcgagaaaagtgacgacaatcactaccgcatttctctggcgctggccggtttccggcagagcgaactgaatattgaagtggaagggccgcggttgaccgtcagcggtaaacccacgccgccggaaaaacaggtcgagtacctgcatcaggggctggtgtgcaaagagttccagttgaccttcaccctggcggaacacctgcaggtgtccgaggccaaatttgaaaatggcctgttgcacatcgatctggtgcgtcaggtgccggaagccttgcagcctcagcgcatcgccatcggcgcgacgccggagctggaagcgaaataaccggctgaaaaacggccatcatcatgcgggggagatccaaacggatctcccccgttgcgttatgtggcgcacgccacagtcccctcgtctgcccgatgccataatccttgttaattgtgtgtctttggccgcaaatcccatgttcaactttggcaaggatgtgacctatgagcgatatcgccctgaccgtcagcatgttggcgttggcggccgtcattgggctgtggatggggaactggaagctgtatggcgtcgggttgggcattggcggcgtgctgttcggcggtatcctggtcggccactttgcccagagcgggcaaatcagcctgaatggggacatgctgcactttatccaggagtttggcctgatcctgttcgtctacaccatcggcatccaggtcggccccggtttcttctcttcgctgcgcgtctccggtctgcggctcaacgccttcgcggtgctgctggtgctgaccggcggcatcgtggcggcggcggtacacaagctgttcgacgtgccgctgccgatcatcctcggcgtgttctccggtgcggtcaccaacaccccggcgctgggcgccggtcaacaaatcctgaccgatctcggttccgatccggcgctggtggacggcatggggatgggttacgccatggcctatccgttcggcatatgcggcatcctgctggtgatgtggctgatccggctgattttccgcatcaacatcgagcgtgaggctcaggcgtttgaaagcagtctgggcaatcagcgcgagttgctgcacgccatcaacgtggcggtgcgcaaccccaatctgcagggcatggcgatcaaaagcgtgccgctgctcaacggtgaagcgatcgtctgttcgcgcctcaagcgcggggagctgttgatggtgccggcgccgcacgagcggctggagcttggcgactacctgcatctggtgggcaaacgcgaagatctggagaacgcccggttggtgatcggcgaagaggtggatgcctcgctgtcgacgcgcggcactgcgctgcaggtggtgagggcggtggtgaccaacgagcaggtgctgggcaagaaaatccgcgatctgaatctgaagcaaaagtatgacgtggtgatttcacgcctcaaccgcgctggcgtggagctggtggccggcagcaacgtgacgctgcagtttggcgacattctcaacctggtcggccggccggaggccatcgacgcggtgacggcgattgtcggcaacgcccaacaaaaactgcagcaggtgcagatgctgccggtctttatcggtatcggcctcggggtattgctcggttccattccgctgttcgtgcccggcttcccggcggcattgcggctggggctggccggcgggccgctggtggcggcgctgatcctggggcgcatcggcagcatcggcaagctgtactggtttatgccgccgagcgccaacctggcgctgcgcgaactgggcatcgtgctgtttctggcggtggttggtttgaaatcgggcggtaacttcatcgatacgttgctgcacggcgaggggctgacgtgggtcgggtacggcgccttgatcaccgcgattccgctgctgagcgtcggtattctggcgcgcacggtgggcaagatgaactacctgacgctgtccggcatgctggcgggatcgatgaccgatccgccggcgctggcgttcgccaacggtctgcatcccaccagcggcgccgcggcgctgtcttacgccaccgtttatccgctggcgatgttcctgcgcatcatgtcgccgcagctgctggcggtgctgttctggacgctgtaatccaaaaaaaggcgccgtagcggcgccctgatggattgcgcttagttcgcttcctgatgcgcacgctcgatctcttctgccaggatcgccacgccgcgctcgattttctccgggtcgggcacgtagttcatgcgcatgcactggtgggtgtgcggccagtcgtgctccagccccgggaagaagtagtggcccggcaccatcagcacgccgcgctttttcaggcgctgatacagcacctcggtggtgatcggcagatccttgaaccacagccagaggaagatggccccttccggtttgtggatcaggcagcgctccggcgacaggtagcggcggataatctcgatggtgtgttcgacgcgctgtttgtaaaacgggcgaatcacctcgttcgacaggcgcagcagatcgccgcgcgcgatcatttccgtcgccatcgccggccccatgctgcccggcgacaggctgatgatgccgttcatgttggtcagcgcggtgatcaccttctcgtcggcgatcacgatgccgcagcgcgagcccggcaggccgagtttggacaggctcatgcacaggatggtgttcgggttccacagcggcgtggcgtcgctgaagataatgccggggaacggcacgccgtaggcgttgtcgatcaccagcggaatatcgcgctgctgcgccagcaggtcgagcttcatcagctcttcgtcggtgatcacgttgccggttgggttggtcggccgtgaaacgcagatcatgccgatgtcgtcgccgatggtgaggtgttcgaaatcaacgtgatatttgaactggccgtccggcaacagctcgatgttcggtttggcggagacgaacagcccttcgtccagcccggcatcggcatagccgatatattccggcgccaatgggaacagcacgcggcggcgcgaaccgtcggcgtagcggccggcgaacaggttgaacaagtagaaaaatgcgctttggctgccgttcgtcagtgcaatattctgtggcgaaatctcccagccgagctcgtcgcgcagcagattggccagcgctttcagcagcgcgtccttgccttgcgggccgtcgtagttgcacagcgcctcggtcagtttgccctggtcgagcatctcctggcacagctgtttgaagtaggcttccatctctgggatctgcgccgggttgccgccgccgagcatgatggcaccgggggtgcgcaggccttcgttcaggtcgtccatcaaacgggtaatgcccgcataacgggtaaatttttcgccgaaaagtgagaaagtcataggtgcagcagtactgttttttagcaggtaatcccccaccataccgccagacaaattcctctgcaatgcggccgacaaatcgaccaatgggcaaaagctttgctcattagccgattgtcagcatattacgctgtattattgtgaccgttcgccggcccataccaccatcaccttatcgtcgccgagtcgacggctgaaggcatagtaggcggcatgcggctgcggggtttgcacgccgccaccgatcgccgggtggcgagcgcggaactgccccaaccgttgccagtgggccagcagcgaggctttttccccctgcaactcaggccagttcatgtcggagcgggtgccctgcagcggatcggaaccggttgggccgagcgggcggccgctttcatcgccgtagtaaatctgcaccgcccctggcgccagcaacagcaggttcgccgcccgctgttggcgcacctgcgagcctttggcgtcgctggcgaagaacagccgggtgtcatgtgaagagaggtagctcaacacgttgaaatcctgcagccgctcggccatctgtcggtaggtggcatcgatgtcggcaaagcagcccagcgcctgcgacgcctggtcctggaaatcgaagttgatcatcgcgtcgaagccgttttggtaatagtcgcttttcatcaccccgtggccccaggcctcgccggtcatccaaaacggcgcgtcatccagcgcctgctgcggatgctccgctttccacgccgccaatgccgccgtggcgcgccgcttcaacagcgccagcgtcggtttttccacgtgcttggcggtgtcgacgcgaaaaccgtcgatgccgtaatcacgcacccactggctgagccagacggtcaggtaatcgcgggtggtggcaccgggcatgtcgcgagcggcggtgtcgggtttgtggcgatagaacagcggcaggccgctggcgccgggcgcttcggttttgatgtccggcaggaaggccagcgacatcgtcaggtcgtcatagcccggcgcgtcatagtcgccgatgtcggtgcggatccagtttttcccccaccatgggcgccagcccgccttgtcgctgaaattgatgtagtcgttgaagctgtgccagttttgccctggcccggggcgccagtcgctccagtttttccccagggttttctccacctctgcaccctgcagatacagcgagccgaagtggaacgtttgcatatccgccagcgtggcgtagccgacatggttcaccaccacgtcgaacagaatgcgaatgccgcgctgatgggcctgctcgaccagcgtgcgcagctcctgttcggtgcccatgttggcgtcgaggcgcgtccagtccagcgcgtaatagccgtgataggcgtaatgcgggaaatcgccttgggtgccgccgccgacccagccgtggatctgctccagcggtgagctgatccacaaggcgttgacgccgagctgctgcagataatccagcttctgcgtcaggccggccagatcgccgccgtgaaaggtgcctatttcctgcaggccgtcgctgcggcgcccgtagctgtggtcattggccggattgccgttctcaaagcgatcggtcagcacgaagtagaccgtggcgttatgccaactgaacgccgccggtttcgccgtggcggcagattccagcagcaacaggccgccgctggcggcggcgggctgcagcgtgattttcccctggctcacctgcgccgtttggccggaatagaaatcgcgcagcgtttcgccttcggtgaaggtggaggcgacgtcgaccgtgaccggcttgccgtcccagcgcgggcagctgcgcacggcaacggcggcgctttccggcgcgctgctcaggctgagctgcagcgtcggcgtgccgctgcgggtgtcgatgcgcacctgataatcgccggcgcggaactgccgccagctggccggcggatgggcgccgcagggctgcagcgacagcgtttggttaagcttcaccgcctcggcgggctgccagcagtggttatcctgatacagccgcagcggcagttggcctttgggcagcgcggcctggctggcgaacagcccggcggcagtttcgtcgaaggccgggaaacccgccaacgtccagccggccagtgccgaaggcgacagcagtatcaacaagggcaggggtaacagtttcatggctctccttacgcgtggcaggaagcgttttttccgctgggtagcgccagtgtggcaaacggcggaaaaatggcctcctccctgcgagggtttttcggggaggaggagaagggcggagcgttttcggattgattcggcttggctttgcgcgcgcgctgcggcagattaaacgatgaacatcaaaggaggttagcgatgacggacaaaaactggcgagaagagatcgttcgggcaattcaggatgccgaattgcagcacttcgccgaagaacatcagctgcaggcgctgttcgcgccgcagcaggaagagcaacacggccggttatccgcagaccaccggccgcgctgagttatttccgcaacagctgcggattgacgcagttttctttcaccgtgccggtcaatgccgcgatcaagttatccaccgcgcaggcggccatgccgtagcgggtttcatgggtggcggagccgatgtgcggcaacgccaccacgttcggcatgctgagcagcggcgaattggccggcagcggctctttctcgaacacgtccaacccggcggcgtggatcacgccgttttgcagcgcttcgatcaacgcctgctcatccaccaccggcccgcggccggcgttgatcagaatgccgcttttcttcattttcgccagctgatcgcggccgatcagatggaaagtttgttcggtcagcggcaacgtgatgcaaacgaaatccgattcggccagcagggtatccagatcgcagcgacgggcgttgaagcgttgctccgcctcttcgtgcgtgcggcgggcgttgtacagcaccggcatgccgaagccgaagtgcgcgcgctgcgccagcgccaggccgatgcgccccatgccgaggatgccgatggttttgtggtgcacgtcgacgccgaaccagtccggcccgatgctgccgcgccattcgccggccttcacccgctccgccacttccaccacccggcgcgcggtcgccagcaccaggctcatgatggtgtcggcgactgtttcggtcagcaccgtcggggtatgcatcagcagcacgttatgggcgttgagcgcctcgacgtcgaagttgtcgtagccgacggaaacggtcgaggccgcgcgcagtttgggcgcctgctgcaggaaagcttcgtcaattttaccgccggaaccgatgatcccttcggcctgctgcagcgcctggcgcagttcgtcgcggttctccggctgcaggccgttgaaggcgtgcacggtgaagtgctgttccagacgttcacgcagatcggcgggcaggcttttgtacaatacgatagaaggcttcatcacgaactccagctgggccaaagggggcatggcgcccccccggttgggttaacagagaaaaagtataaccggatcaagccaattgtggctggatctcgttgcgggcgggcttgacgatcagcgtcagcaccaccgccaccaccagtgcgatggccataaacatgtaagaggccgccgggctgccggtggcgccattcagatagccgacgaaccacgaaccgaagaacgaacccagcgcgcccatgctgttgatcagcgccatggcgcccccggcgacgtttttcggcagcatttccggaatgatggcgaagaacggcccataaggggcgtacatcgcggcgccggcgaccaccagcaggccgtaggagatccagaagtggttggtgccgacggcgtaagagccgaagaacgccagcgcgccgatcagcagcagcggccagacgaacagcttgcggttttgcattttgtccgacgcccaggagacgacgatcatggcgatagttgccgccaggtaaggcaccgccgacagccagccggcttccaccatgcccatctgcatgccgctgcgcaggatggaaggcagccacagcacgaagccgtacacgccgatgctccaggcgaagtactgcacgcacaacaggatcacgttgcgtgagcggaaggcttcgccgtagttgcgcacggccttgatgcctttctgttcttcgtccaactgctgttgcagcgcctgtttctcatcggcgctcaaccagccggcctgcgccggtttgtctttcgccagcacccaccagcagaacgcccagataaccgccggaatgccctcgatgatgaacatttcgcgccagccgaaggcgtggatcaggtagcctgacaccacagacatccacagcaccgtcaccgggttgccgaggatcaggaaggtattggcgcgtgaccgctccgatttggtgaaccagttgctgatgtagatcagcatcgccggcatcaccgccgcttccaccacgccgaggataaagcggatggcggccaacatcgggatattgctcaccacgccggtcagcgaggcgcaaccgccccacaggatcaggcaccagaagatcaattttttgacgctgcggcgttcggcgtagatggcgccgggaatttggaagaagaaataaccgaggaaaaacagcgcgcccagcagcgaggccatgcccttggtgatgccgagatcctcattgatgccggcggcggaggcgaagctgaagttggcgcgatcgagataggccaggctgtaggtgataaacacgatgggcatgatgtaccaccagcgtttggccgcgacagtcgctttgttcatgttcagtatccttcagtggtgttgcatccccttcgcccggcatgccagaagaaggggcagatgctctcccgacgcgtcccggttgtagggccagaggctgacgtcatgcggagaagtcgtttttttattgttattcggccagcgccgcgcgggtcggcaggccttcgctgtcgccgatggcctggatcgccagcgaaccgattttgttgccgcgctgcaccgcctgtaccagcgttttgccttccagcagggcgctgagggtgccgacggcaaagccatcacccgcccccacggtatccaccacgttgtcgaccttgactgcggccaccgccgccttatcgccggcggcggttttaaaccaggcgccgtccgggccggttttgatgatcaccgcctgcacgccgcgttccagatagaaatcggcgatgccttccggcgtcgattggccggtgaggatctgcccctctttcagccccggcagcacccagtcggcggcgaacgccagctggttcagctgctcgatcatcacctcgcggctgggccacagcaccgggcgcagattggggtcgaacgaaatggttttgcccatggcgcgcatctcgcgcgccgcatggtggcacagcgccagcgattcgccggacagcgccgccgccacgccgctcaggtgcaggtggcgcgcggaaccgaaatactcgcggttaaaatcggcaatcgacaggtggctggccgccgagcccttgcggaagtactccacgctgggatcggtaccatcggtggttttggatttcacctgaaaaccggtcggatagtggccatcgaccgtcacctgccggtagttgatgccttcttttttcagctgctgcagggcgaagcggccgaacgagtcattgccgacgcggctgacccagccgacgttcatgcccagacgcgccaggccgatcgccacgttcagttcggcgccggcgatgcgtttggtgaaggtttccacctccgccaggtcgccggtttgcgccgccacgaacatcgccatggcttcgcccagcgtgaccacatccaggggcgtctgctgcgccgtcgttgccgttaacgttgtcatcatggggttactccgcacgcaaaatattgacgtaatgacgggtgacggcctccaggtcatcgccctgcaacgggaattcgataccgcgcggcgcatcgtgcggcaggcgggccagcagatcgcgccagctgccgtcggtatcgtccagcgcgacggcgcgccagccgcgcgggccttgggtggcggctttgacgtgcacgtaaccgacgtggcgggccaggcgctcggcggcggcgaaggcgtcttgccccacccacagccagttggccatatcgaaggtcatgctgaccggcagatggctatcttccgcggcgtggaaaaaggcgttcagcatcgacaaaatgccgcagtccggcgtttggtcgttctcgaccaccagcttgaccgggtgttgctccagcgccactttcagctcggtaaaatcgaagccggggcggaaatgaccgagggacagcttcagctggcgcgcgttcagcgcctgcgcttccgccagcagcgccggcaggttggggttcagcgtatgttgcggggtgaacagcgcctcaggggcggagtagacggcgaacagctgctggcgatcgatctcttgcgccagcaccggcaggctgtccagctcgccggcggcgaacagttcgcggcggatctccaccccgtcggcgccagcgccggcgatgaggggcaacagcgcgcgctggccgccgtgttgtttgacggtatcggtgccgtaggcgccggtgaccacgatgatttctgttttcattttgactcctgaggcggcattgtcgccgccgctgctgttaccggtacgttaaatggaaccggttccagcgaaaagcggcagagtgtaaaaatatgatcgcaatcacgaagctgagcaaaaaacagccggtgagggcgggacggttaacgccccggaaaaggcgggttagcgggtggtggagccgcggacgatcagctcgccggagaacatctgctcgccgctgggggcggccaggccctgaatgcgatgcaccagccgctccagcgccgcgtgccccatttggtaggtgggctgtttcagcgtggtgatgccgacgcccgccagttccgcccactccagttcgtcaaagcccagcaggccgatgtcgttgccccactggatgccgagccgacgcatggcgcgcgccacctgcagcgtcagggcgccgttggcggagatcaccgccttgcgcatgccgcggtggcggccgctgaaatcgctcagcacctgctccagcttctgccgatcgttgagcggcgtttcggcctgctccgccaacagcgcggggtgctgcgccatggtatgcctgaaggcgtgcaggcgttcgaggcgggtattgaccgtaccgagcggctcgctgaggaacaggatcgcttcgaaaccttgttgcagcaggtgttcggtggcgacggtagcggcttcgcggttgttcaggcccaccacgtcgcaggcgaaatcggggattttgcggtcgatcagcaccatcggcagcatcgactgttgcagcgtggataacgcttcctcgcgcatgccgaccgcgttgaccacgataccttccacccggtaactgctgagcaactgcaggtagtgctgttcctgattgacttcgttgttggtattacacaccagcagggtaaagccgtgctggcggcaggcggcctcgatgccgcgcatcacgtccaccgagtagggattggtgatatcggcgaggatcaggccgatcaggcgggtctggccgcccttcaggctgcgcgccatctggcttggccggtagtcgagctgctggatcgcctgttcgatgcgctgtttgagatcgtcggaaagcaggtgttgttcaccattcagatagcgcgacacgctggtcttgccggttttggcgatgctggccacatcgctgatggtggcgcgtcccgatgcgcgcgttgccttgacagtgctcacagccgatccctcctgcggttaattgccaaggagactaccatacccgatgtgcgggcgggaatgttgaagggtaaggagaaaatcgcagggaggcggcggggcgcaggtggcgccccgcacgggattactgcagcgggctgagcgtgatctcgacgcggcggttttgcgccttgccttccgcggtgctgttggaggcgatcgggttgtccgggccggcgccggtggtgcggatacggttcgccgccacgccctgggtgatcagcgcgctggctacgccgtcggcgcgctgctgcgacaggttcatgttgagcgaacgggaaccggtgctgtcggtgtagccgaccacgttgaccgcggttttcggatactctttcagcaccatggcgacgccggtcagggtgttggcgcccgccggtttcagcgtggcgctgctgctgtcgaaggtcacgttgttcggcatgttcagcacgatgttgtcgccctgacgggtgacgctgacgccggtgcctttcatcttgtcgcgcagtttggcttcctgcacgtccatgtaatagcctacgccgccgccgagggctgcaccggccgctgcgccgatcagcgcacccttgccgcgatctttcttggaagaggacagcacgccgacgccggcgcccagtgcggcgccgaggcctgcgccgatgccggatttgccggcttcggattcaccggtgtaagggttggtggtacaggccgacagcgcgagcgtaaggctcacggcgccggcaataattgcaatgcgttttttcatgttcttgtccttaatggcatcagaatctgtacgcgccggcccaaaacggggacgcaaaaaagtgggtgacgcagggagcccgcatcgccgcgctacctatgacgcgcgctttcgccggcagttccggagaaaaacgtgacaaatgatgagcgcgggtaagtgctgggggagttatgcggcaaaacgccgggcggcgccatgcagcggattcctaattgtgcgcatccggggtgcggatgcgccttttttaagcgtaaccggttgagttttcgactgccggccagttcatgatcagcgtataggcctgggtttcatcattgaacaggcgctgcgttatctgaaagccgtgcttgtggtagaacgcgcaggcgcgcaggttctgttggtacacctccagactgagtcggcggtagcgctgttgcacgtgcgtcatcagcgcctgggcgacgccgcggccgtgaaacgcccgatcgacaaacagcgcgccgatgaactgctcgtccagcacgctgataaagccgacgatctcgccttcgtgccagcaggcccagctttgcgcgcgcggcaggtagttttcccgcaccagcgcggcgctctcacgccagtatttttccgccacgaacggatgggcggcgatggtgctgggcagccacagcgccatcagccgttcgatatcctccgggccacaggggcggatcaccgtggctttgggtaacacatgcaccccgtgagatgatcgttcaccagcccgctggcctgcatgaaggcgtaacagatggtggagccgataaacttgaagccgcgctttttcagcgccttggacatggcgtcggactgctcggttttggccggcacctggttcagcgcttgccagcggttgagctgcggccggccgccgacgaagtcccaaatgaaggtaacgaaattctccccggccgcctccatcgccagataggccttggcgttggtgatgatggcttctatcttgccgcgatggcggatgatgccgctgtcctgcagcaggttttccacgtcttgttcggtcatggcggcgacccgctgcggatcgaaaccgtggaaagcgcggcggtagttctcgcgctttttcaggacggtgatccaggaaaggccggcttgctgcccctcgaggcacaacatttcaaacagctcgcgcgcgtcggtggtgggcgcgccccattccttgtcgtgatactcgagatacaacggatcggccgtcacccaaccgcaacgttcgtctgccatcctgaatgtccttatgctgtgtttatgaacagtaatcatcgctcgaagcgccgaacttggcaagtctctgattgttttgtcatcagcccgcttgacgtgacgaaaaagccgacaatagttactacatggccggtggaaaactgaccaacgataaaaacgacatggccttcatttgcaggctctcaggagtcgattcatgcctctaaaaataacgtgcatgccccgcccggcggcgcttgcagtggcgttactttgcagtgtgacccttccggctcaggcgtacgatcaactctacgtctttggcgacagcctgagcgataccggcaacaacggccggttcacctatgacggcagccagcacctgctgtacgacgaagcgttggcgcaacgcatcggggcggcgctggtggcttcggacaacggcggtgagaactacgccgccggcggcgccgtggcggtgccgggtctgaacccggccgacaacacccaggagcaggtgcagcgctatctgaaccgggtcaatggccaggccgacggcgacggtttgtatattcattggatcggcggcaacgatctggcggcggcggcgctgaatgccgctaccgcgcccggcgtggcctataacagcgccgccgcggcggccgcgcaggtgcattcgctgctgaacgccggcgccggcacggtgatcgtgccgacggtgccgaacatcggctccacgccgcagctgatggaattgatcattcaacaggcgctgtctccggtgcagggggcggcgatccaggcggcctatgccacgcttaattcggtggcgacgccggacaacgcttcacgcacgcaggcgatccacgcagcgttggccgctgcggcgaagcagggcagcgccattcctcaggtgcagcaggcgatcgccgcgcagcttatcgcggcgtatgacggcctgagcgcgcaggccgctcagctgaccgatttctataatcaaagcgaagaccgtttgctggcgcaggggagcggcaatatcgtgcgggtggacgtcaacaagctgttcgccgaagcgatcgccaatccggcgcagttcggcttcgccaacaccgccggcatggcttgcccgccgggcgtttcctcggcggtttgccgttccgacatgcccggcttcgacgccggccagtcctatctgttctccgaccatttccaccccagcccacaggcgcatctgctgattgcggattatatccaggcggtgttggatggcccggcgcaggtggtggcgctgaatcaggcgacggcggcgatggcgcgtgacagccgcgccacgctcgacagccgcttccagcagctgcgcaacggcgacaacccgcagggttcgctgggcgtgttcggcggttacgccggccagcactacgactatgccgataaccgggccgcgggggacggcaacgctaccacccacaacctgaccgtcggcgtggactatcagctgaccgacagctggttgatcggtgcgttgatcgccggttccaacgacgatcagcatccttccagccgctttgattacaaggcgcgcgggctgctgctctcggctttcagttcactggcgatattcgagcacggttgggtcaacgccgatctgcactatgcgacgatggattatgacgacatccgccgcagcatgcggctggggccgctgacgcgcaccgaaaccggttcgaccaccggcaggcagtggggggcgcgcgtgaccgccggctatgacttcccgatcgcttcttacctgaccaccgggccggtggcgcagttcgcctgggattacagccgcgtttccggttacagcgaagacggcgatgacagcaccgccatgcgcttcaacgatcaaacctaccactcgcagatcggtgcgttgggttggcggctggatacgcaattcggcgtgtttaacccttatgcggaagtgagttatcagcatcagttcggcgacgacgtctaccgcgccggcggcggcctgaaatcgacgcaaacctcatttactcgcgacagtgcgggtcaggacaaaaactgggtggatgtcacgctcggggccaacatgccgttgacggacagggtgtcggccttcgccaccgtctcgcaaaccggcggcctgagcagcggcgagcagtttatgtataacgtcggcgtcagcgcgcgtttttgaatggggtgcctgcagagcgcgtttgccaaaggcgtgctaaatggcattgcgtaagcgatacgttcttataagggaagctaattaagaggaagaggacgggaattaattatgcgggccgccataatgctgacggaaatacaaaaaaaaactgatcctatgaaaggatcaggtagccacttggccaacaccagggaaaattttaattattattgtataaccaaagattaactgtcaatgggtttatgtggctcattgttggcgtattacatatccgcttgtttctcctcgagtcgctgccgcggcccatcgcgtgatctctccttatttttcacgatataagaaataatttggcggttagtcacattatctgccggtgaggcgagttttttagttgataaaattaacaaaaataacattggcgtaactttgccctgtggcaaatataagcatgtgtgcatttcaatctgcgtaaatagggttggtgagaacaggagctgcgggcgaataagtgacgatttaagcaacgattagtctcgttttttgttaagttattctaatgtttttggcgggtcgtattttcgccccgttcgtcgccggtgaaattagccggctaaccggcgccctgtcctgcgcgcgccgcgcgcgaaaatccagcgtttctcgccccgattcgcacttgttgccggattctggctgtatatcttacggtcaacgggtatactggctcattccatctaaatccacttgtatcgcgtgcgaattcaacatgcaaaagtttgataccaagaccttccagggcctgatcctgacactgcaggattattgggcgcgccagggctgcaccatcgttcaaccattggacatggaagtcggcgcgggaacctcacacccgatgacgtgcctgcgcgcactggggccggagccgatggccgccgcctatgtgcagccatctcgccgcccgaccgacggccgctacggcgaaaacccgaaccgtctgcagcactactaccagttccaggtggtgattaagccatcgccggacaacattcaggaactctacctgggctcgttgaaagagctgggtctggatccgaccatccacgacattcgcttcgtggaagacaactgggaaaacccgacgctcggcgcctggggcctgggttgggaagtgtggctgaacggcatggaagtgacgcagttcacttacttccagcaggtcggcggcctggagtgcaagccggtgaccggcgagatcacctacggtctggagcgtctggcgatgtacatccagggcgtggacagcgtgtacgatctggtgtggagcaacggcccgctgggcgtcaccacctacggcgacgtgttccatcagaatgaagtggagcagtccacctacaacttcgaatacgccgacgtcgacttcctgttctcctgcttcgagcagtacgagaaagaagcccaatcgctgctggcgctggaaaaaccgctgccgctgccggcctacgaacgcatcctgaaggcgggccataccttcaacctgctggacgcgcgcaaagcgatttcggtgaccgagcgccaacgctacattctgcgcatccgcacgctgaccaaagccgttgccgaagcctactacgcttcccgcgaagcgctgggcttcccgatgtgcaacaagaagaacgagaactaagaggcagccatgactcaacagactttcctggtggaaatcggcacggaagagctgccgccgaaggctcttcgttccctggcggaatctttcgccgccaacttcaccgccgagctggacaacgccggcctggaacacggtgaagtgagctggttcgccgcaccgcgccgcctggcgctgaaagtggctaacctgagcgcggcgcaggccgatcgcgaaattgaaaaacgcggcccggcgatcgcccaggcgttcgacgccgaaggcaaaccgagcaaagcggccgaaggctgggcgcgcggctgcggcatcaccgtcgatcaggctgaacgcctggtgactgacaagggcgagtggttgatgtaccgcgcccacgtcaaaggccagtcggcgcagcaactgctggccggcatggtcagcaccgcgctggctaaactgccgatcccgaaactgatgcgttggggcgactccgacgtgcagttcgtgcgtccggtgcacaccgttacgatgctgctgggcgccgatctgatcccgggcaccgtgctgggcatcgaatccgcgcgcaccgtgcgtggccaccgcttcatgggcgaagccgagttcaccctcgataacgccgaccaatacccgcagatcctgctggagcgcggcaaagtggtcgccgactacgaagcgcgtaaagccctcatcaaacgcgacgccgaactggcggcgcagaagattggcggcaaagccgatctgagcgacagcctgctggaagaagtggcctcgctggtggaatggccggtggtgctgaccgccaaattcgaagagaaattcctggcggtgccggcggaagcgctggtgtacaccatgaagggcgatcagaagtatttcccggtgtatgacgccgcgggcaaactgctgccgaactttatctttgtggccaatatcgagtcgaaagacccgcagcagatcatttccggtaacgagaaggtggtgcgtccgcgcctggccgatgccgagttcttcttcaacaccgatcgcaagaaacgtctggaagacaacctgccgcgcctggaaaccgtgctgttccaacagcagctgggcaccctgcgcgacaagaccgatcgcattcaggcgctggcgggctgggttgccggccagatcggcgccgacgtcaaccacgccacccgcgcgggcctgctgtcgaagtgcgacctgatgaccaacatggtgttcgaattcaccgacacccagggcgtgatgggcatgcactatgcgcgccacgacggtgaggcggaagacgtcgccgttgcgctgaacgagcagtatcagccgcgctacgccggcgatgcgctgccgcagtcgctggtggcctgttccctggcgatcgccgacaagatggacaccctggccggcattttcggcatcgggcagcatccgaaaggcgataaagacccgttcgcgctgcgccgcgccgcgctgggcgtgctgcgcatcatcgtcgagaaaaacctgccgctggatctgcagaccctgaccgaagaggccgtgcgcttgtacggcagcaagctgaccaacgccaaagtggtcgatgaggtggtggaattcatgctgggccgcttccgcgcctggtatcaggaagaaggccacgcggtcgataccattcaggcggtgctggcgcgccgtccgaccaagccggccgactttgacgcgcgcgtcaaggcggtatcccacttccgcacgctggacgaagcggcggcgttggctgcggccaacaaacgcgtctccaatatcctggccaaatctaccgaaacgctgaacgacagcgtgcgcgcctcggtgctgaaggacgcggcggagatccagttggcgacccacctggtggtgctgcgcgacaagctgcagccgtacttcgcggcgggcaattaccaggaagcgctggtggaactggctgcgctgcgtgaaccggtggatgcgttcttcgacaacgtgatggtaatggcggacgatgcggaagtgcgcgtgaatcgtctgacgctgctgagcaaactgcgtgaactgttcctgcaggtggcggatatctccgtactgcagtaaacggctctgtgctgtgaaaaggcgcctgcgggcgccttttttatttccgtttcctgggtgcgaaggcaaggtcgcctggcgacttggggggcgacttggggaaattgaagcatccggtcgccgacggcaatgaacctcagtgcgttttgcgcacgatgttcaaccgcctccggccgagacaatgttcaccgcaaacggaatcgcgtatcggaacgccgccagttgatctattcttataggcgcacggagtgcggaaaaaggggcggagtccaatgaaaaagcaggtttataacaggagttatgtcacatggcggtagggatccagagcagaggtttcgcgcgttggttggcaccggtattggcattgttggtggtcatgcaattgaccgcctgcggcgataaagagccggaacagcgcaaagcattcattgattacttacagaataccgtgatgcgcagcggggcgaacatccccacgctgagcgaagaccagaagcagaagttcggcaactatgccggcgattacgcgattttggtcggcttttcacagcagctgtccaagtcggtcggcgccagcctgacgccagcgctggatcagattaaccagatccgcaccgcacaggactatctgaacaaacgcgatgcgttgcagcaatcggtcggggcgttgaacctgctgggccagcagatccagtccgccaagtcgcaggcggataccgcccgcacggcgctgaaacagcccgacgatctgaaggcggtgtataaccaggcctatgacaaaatcgtcaccgcgccagccaacgccctgatgccggcaatcccgaccaccgccagctttgtgcaggatctggtgcaggttggcgatttcctgcagagccagggcaatcaggtcagcttcaacaacaacggcgtgcagttccgcaccgcgcagcaggtggcgcagtacaacaccatgatgtcgaatctggtggccaaacagcagaacctggtgaatgcgcagaaagccattcaaagcgtgacgcaataacgcgcctacgacgatctacaggccggcattgccggcctgttttatttcccctcagcgtttccaatagcttgctggtttattacgcaggcttctgtactacacttcaattaatccattcattcggcattgtagttttctttcattcatcacttcgctagttcccggcgggatgagtgctcacagggaagatcaaacagagcgtcgcgttcgggcgctgcagctaaaaataaattgtgatgtttatcacaatttaaaaacaaacaaccaagttaaaaatgtgacattaatcactttattgtcggtttttgggcggtttttttctcactgtgctttttttacacgccataaatgtgatctttatcaccataaatgaggggttgttggggtgttgtgtgtgacttgtgtcacaaaaaattcgtgaagttcgcgtgacaaaaacagcgtgatagagtccgtttcgcatacagcggcaacacggctggatcgtcacaacaataatcacgcgctctattgtcagcgcgtaacaataggggtgtgttttatgttttcaccagacatcaaggttaaagtgcaaaactttggccgcttcctgagcaacatggtgatgcccaacatcggcgcctttatcgcctgggggattatcaccgcgctattcattccaaccggctggctgccgaatgagaccttagccaagctggtcggcccgatgatcacctacctgctgccgctgctgatcggttataccggcgggcggctggtgggcggcgatcgcggcggcgtggtcggcgccatcaccaccatgggcgtcatcgtcggcgccgacatgccgatgttcctcggcgcgatgatcgccggtccgctgggcggctgggccatcaagcacttcgaccgctgggtggacggcaagatcaaaagcggctttgaaatgctggtgaacaacttctccgccggcatcatcggcatgctgttggcgatcctggccttcctgggcatcgggccgctggtggaggtgctttccaagctgctggcggcgggcgtgcacgtgatggtgacgaacaacctgctgccattggcgtccatcttcgttgaaccggcgaaaatcctgttcctgaacaacgccatcaaccacggcatcttctcgccgctgggcatccagcaggcgacggaagccggcaaatcggtgttcttcctgatcgaagccaacccaggcccgggcatgggcgtgctgatggcctacatgttcttcggccgcggcagcgccaagcaatccgccggcggtgcggcgatcattcacttcctgggcggcatccacgaaatctacttcccgtacgtgctgatgaacccgcgtctgctgctggcggtgatcctgggcggcatgaccggcgtattcaccctgacgatgctgaacggcggcctggtgtctccggcttccccggggtcgattttggcggtgctggcgatgactccgaaaggcgcctacttcgccaacattgcggcggtgtgcgcagcctttgccgtctccttcgtggtgtccgctttcctgttgaaaacctccaaggtgaaagaggatgacgatctggaagccgcgacccgccgcgtgcaagagatgaaatcgcagtccaagggcggcgcggccgcgccggcggcggtcgatggcgatctgagcaccgtgcgcaaaatcatcgtcgcctgcgatgcgggcatgggctccagcgccatgggcgccggggtactgcgcaagaaagtggccgacgccgggctgaagaacatctcggtgaccaacagcgctatcaacagcctgccggacgatgtggatctggtgatcacccaccgcgatctgaccgagcgcgcgatgcgccatgcgccgcaggcccagcacatttcgctgactaacttcctcgacagcaagctgtatggcgatctggtcgagcgtttgctggcggtgaacaccgctgccgcagcggccccgcagagcggcgcgtacgcggctgcagaggccggcgaaccggggctgttcaagctaagcgagagcaacgtgttcctcaacctgcaggccagcgacaaagagcaggcgatccgcttcgccggcgagcaactggtgaagggcggctacgttgagccggaatacgtgccggcgatgctggagcgcgaaaagctcacctccacctacctgggcgaatcgatcgccgtgccgcacggcaccatcgaggccaaagaccgggtgctgcgtaccggcgtggtgttctgccaatacccgcagggcgtgcgcttcggcgatgaagaggatgaagtggcccgtctggtgatcggcatcgccgcgcgcaacaacgaacatatccaggtgatcaccagcctgaccaacgcgctggatgacgagagcgtgatcgagcggctggcgaataccaccagcgttcaggaagtgctggacctgctcggcggcaaaaaagccggataacagaatcattttcaagggtgcagcgtgctgcacccttcgacattaagaaggtagagttatgaaagcattacattttggcgcagggaacatcggccgcggttttatcggcaagctgctggcggacgccggggttgagctgaccttcgccgacgtcaatcaaacggtgctggatctgctgaacagccgtaaaagctaccaggtgcacgtggtgggcgagcaagagcgcgtagagagcgtcaacaacgtcagcgccgtcaacagcggcagcgaagccgcggtggcgctgatcgccgaggcggatctggtgaccaccgccgttggcccgcaaattctcgccaaaatcgccggcacgatcgccaaagggctggtgctgcgccatcagcagggcaatgtgcagccgctgaacatcatcgcctgtgagaacatggtgcgcggcaccagccagctgaagcagcacgtgtttgccgcgctgccgcaggacgagcaggcatgggttgagcagcacgtcggcttcgtcgattcggcggtcgaccgcatcgtgccgccggcggacagcagcgatccgctggaagtgacggtggaaaccttcagcgaatggatcgtcgatcagacgcagtttaaaggccagcctccggcgatcgccggcatggagctgaccgataacctgatggccttcgtcgagcgcaagctgttcaccctcaacaccggccatgccatcaccgcctacctcggccaacgggccgggctgcaaaccattcgcgacgccattctcgacccggcgatccgccgcgtggtgaaaggggcgatggaagagagcggcgcggtgctgatcaagcgttacggcttcgacgccgacaagcacgccgcctacatcaacaaaattctcggccgcttcgaaaacccgtatctgcacgatgacgtcgagcgcgtggggcgccagccgctgcgcaaactgagcgccagcgatcgcctgatcaaaccgctgctgggcacgctggaatacggcctgccgcatgccaacctgatccagggcatcgccgccgccatgagttaccgcagcgaacaggatccgcaggcgctggagttggcggaattgctgaacacgctcgggccgaaagccgcgctggcacaaatttccggcctgccggcggaaagcgaggttgtagaagaggccgttgctgtgtataacgccatgcacaagtagaatcgtgatgatgaacacccgagcgcagcttgctgcgctcctggaacccgagttcggcatcgacggccctccccacgcctttcgaaaagcgacgatggaagaagcacaggcatttgaaaaccaggttctggaaaagctgaacgcgggcaaaacggtgcgcagcttcctgatcgcggcggtagagctgctggcggaagcgctcaacgtgctggtggtgcaggtattccgcaaggacgactatgcggtgaaatatgccgtcgaaccgctattgtccggcagcggcccgctgggggagctgtcggtgcgcctgaagctgatgtacgggctgggggtgatttcccgccacgaatatgaagacgccgagctgctgatggcgatgcgcgaagagctgaaccacgacggttcggaataccgcttcgtcgacgacgaaatcctcgggccgttcggcgagctgcactgcgtggccgcgttgccgccggtgccgaccttcctgcagccgggcgaggcggatgaagcgctgatcgccatgcagcgtcagcgctatcagcagatggtgcgctccaccatggtgctgtccattaccgacctgatcgccggcatcggtgccaaacaaccttcccgactctctcctctcggccgcggctaagcgaaggccgcgcgccattcgtcgaacagcaaccacagcgcggtggcggccatcagcccggacatcacgccgttgaaggcgcgcagtttccaggtgacccgcagcgcgttgcgcaaccggtcacccaacaccgcccacagcagcacgcacggcaagttcagcaacgcgaaaccggcgatgatagacagcgtatggacaaaggtggcgccttcgcgcggggtgaacaggatcgccacgttgatcaccatcagccaggccttggggttgaccgcctgaaacagcgcgccgttgagcaggctcatcggctgcgcctgctctttggcgtccggcgaggccgcctgaaacagtttccacgacagccacagcaggtaggcgcagccgatcaccgccagcgggaagcggatgacgccggcccagctcagcgccagcgccagcagcgggataatgatcgccagctgtactgcacaaccgacgcagatgccgaacagcatcggcagggtgcggcgcaggccgaagttgacgcccgacgaggccagcagcaggttgttggggccgggggtgatcgacatgacggtgacgtagctgacaaaggcggagtccagcatggcaggttccttgaaaatgacggtgataacgagaggatcagcataatcgctgcaatgggatggtgacagaaccacaaatcggctattgtcatggttacagttgtgcaaaatgtaaactgtacccattccctggagagaaactgtgaccctgctcgatgaaaccccggatacccgttacctgcagctggcggatacgctggccgaggccattcgccgcggcacgctgcagcccggcgaccgcttgccttcggtgcggcgctgtgcgcaaacccatcgcgtcagcatcaataccgtggtgtcggcttaccgcacgctggaggatcgcgggctgatcgaagcgcggccgcagtcggggttttatgtccgcagcacgctgccggcgctgaagatggcctcggcgcccagcggccgcatcgaaccgccggcggacgacgtgctggcgttgatcgatacggtgttcgccgcccagcagaacccggccttcaccaacattgcgctggcctgcccgcagaccagcgatttctatcccggcggcaaactggggcgcatgctgtcttcccaactgcgccgccagccgggtctgatcggacaatatccgttgccgcccggcagcctgcggctgcgtcagcagatcgcccgccgctcgatgacgctgggcatgctgttggagccgggcgacgtggtgttgacccacggctgcatggaggcgctgcagctggcgctgcgcgttaccacccaaccgggcgactgcgtcgggctggagtcgccgacctacttttatctgctgccgctgctggccagcctggggctgaaagcgctggaaatccctaccgatccgcagctggggctgtcgttggacgcgctggagctgctgctgaacgagaagcggctgaatgcggtgatcgccatgccgacggtgcaaaacccgctgggttgcactatgccgctggccgcgaaaaagcggctggcgcggctgatgaacgatcatcaggtgccgttgattgaagacgggctgtatgccgagatccagttcggcggggcgctgtcgccggcggtgaaggcgttcgatcgcgacggctgggtgctgttttgctccagcttcaccaaaacgctggcgccggattttcgcgtcggctggatctgcggcggccgttttcacgaggcgttgcgcaagctgaaggcggtgtcgtcgatgtccgagtcgcagctgctgtcggaaacgctggcgaccttcctggagagcggcggctatgatcaccatttgcgcaacctgcgcaagcgctatgcggcgcaggtcgacgaggcgagggcgctgatcgcccggcatttcccgcgcggcacgctggccacgcagccggcgggcggcttcgtgttctgggtcgaattcccccccggcgtggacagcgtggcgctgttccatcagctgcttgaggagcagatctgtttgacgccgggcaccctgtattccccgagcgggcgctaccgcaacgcgctgcggctctcctgctgctacccgttcaacgcgcgctacacccaggcgctggctcggctcggcgccagggcctgcgagatgagcggcctgccgcccggcattgcgcaggacgggtaacggcgcgcgccttttgctacaatgccggtatcattgattagcgtgccattttgggcacaatgggccagagaccatgaaagagaaagaaaaggcagagatcaagcgcctgagcgacctgctggacgccttgaaccacaaagacgccaccgtgatccaacagggcaaccctgacttgatcgcgcagcacaccaaagagaaagagaagctggcgacggagatcgagcgcctgaaaaacgtgcgcggcgagaagctgagcgccgaagcgcagaagctgagccagctgccgttcagccgcgagatcaccaagaaagagcaggccgatatgggcgcgctgaagaaaagcgcgcgcgggctgatcgtagtgcacccgatgaccgcgctgggccgcgagatgggcctgaaagcggtcaccggctacgccaagaaagcgttctgaatcccgggcgtcagaccttggtggtgaaatacgccttggtctgatagggcacggtgaccgtgtcctggccccgcagttcctcttcttccgccaccagttggcgcaaccgatcgataacctgctcctgttgcgcctgcggcagcgcggcgataaagctggttgaacgtacccggttgtagatcacgtcctccaccgccccccggtggccgagcataaacacctgctcctgcagcggttcaaagcctttgaacgggaagaatttgcgccattcgccggtatagaaacgcggcgcatcgccttcatggctatcgacgatctgattcagtttacgcacccaaccgacgcgcgcatcgcgcatgttccacaccaggctgagtttgccgccgggcttgagaatgcgctggatttccgccagcgcctgcggcgtggcgaaccaatggaaggactgggcgcacaccacggcatccaccgactcgtccggtagcgggatcgcgtcggcggtgcccgccagcgttttcacctgcggcagcgccgccgacagtttttccagcatttgcggcaccggttcgacggcgatcacctgcgcgccggtttccagcaggcgcggggtgaacttgccggtaccggcgccgagatcgatgaccgtcatgccggcgtgcaggccgatgacgtcacgcagccagtcggcgatttccggcgggtaatccggccggcctttcacatagcgatcggcattggcctgatagccttcggcggcggcgtgatgaatcgaatgggtcggggtggtcatatacctggctcctggctgaaaaaacgtgcggctacagtataggcggaagaaaagggttaacgcggcattcggcgcacgtttttcattttccgctcgcgctttcaacggccgagcaggcggcggttgaaatcctcaaggcgcccttcggcgagccgcgtgagcatggtcttgctccagctggcggagaggccggccaccgccaacagacggcgatactgttccgcatcgaacggcatgtgccaggcgatggcgatggcttcggccaccgacacatcgctgttgcgcgccgccagcgccagcggacgatcgccgctgaccgcgcccggcgacaccacccgatacagccagccgcagcggccgctttgctgcatcagcaccgaaatgtcctcgatggcgaagtgataattgagcttgaagcacggcgagcgcggctgggtgacctggatcagcgcctcgccccagcggaagatgtcgcccataaacacattgtgttcggtcagcccttcggtggagatattctcgccgaaggccggggcgcaaaattgctcggcctgcgccggaaactgctcgcgccagtgggcataatgctcgcgcgggtagtgacacagcgcgcggtccggcccgccgtggtagcttttttcggcctgttcgtcgccttccagcccgagcggcgtgagccggatggcgccatccacctggcgtttggcgatggcgctggggcgcccgccttcatagggttggatgctgccgatgtaaacgtctgggtgatgcatgtgcgcctccgtgtctcgcgtcgagggctcagcatagcctgagttgttcccgtacactacccggcgtttacctgtacggaaggatgtgtttttcctgtctatatttaggcttttatcgtcgagaaaaaaccatgcgtttcattgtattgaggcatgcggagtcagaatggaaccgctcggggattattcaggggcgaagtgacagtccgctgacagaagaggggcgacgtcaaatcgctgggcttggcgctcgcttgcaaatgttatcggtcactttgttgatcagttcaccggctggccgggcttttacgacagcggagacgttggctgagagatgtggctgcactgtgcaaatggataagcgtttgcaggagcaagattttggccgactggaaggattatcttatgcgcaggccatgcgcgattatcctgaagcgacgcagtgcctctttgccggtaaggcagaggcgtcggctccgggaggggagaatgcttatgaggttgcctggcgcctgatggcttgtctgtccgatctggctgtcgatggacaaaatcaaacgcttggtgtggttacgcacggccatgctctgcaggcactgatttggtggcttaaaggggctgacccgcaggaggacctccgcagatacggtcatcgcaattgcggctacgcaatgcttgatgcgaccgcctctggttttaacttgttgaattggggagttgcgacccacctgttgccacaaagatagggcgaggaacggatattcctcgcctgatggcgtcagaaggtggtccagttctcttccgctgcggcgttggcggcggcgggttttacggccggcgctttcggcgcggcggctttcacggcggcgggttcggtctgctccgccaaacggaacaccgaaacgctctgcaacagcatgtcggcctgctcttccagcgaatcggcggcggcggcggactcttccaccagcgcggcgttctgctgagtggtatggtccatttcgacgatcgcctggccaatctgggcgatgccgcgcgtctgttcatcggaggcggcggcgatctcggccatgatgtcgcgcacgtgggtgaccgagcggacgatctgctccatggtattgccggtgctttccaccagttcggtgccggttttcacccggctgaccgattcggcgatcagcccttcgatctccttcgccgcttgggcgctgcggctcgccaggctgcgcacttcgctggcgaccaccgagaagccgcgtccctgttcgccggcgcgcgctgcttccaccgcggcgttgagcgccaggatgttggtctggaaggcaatgccgttgatcagggtagtaatttcggcgatacgctgcgaactgctggaaatatcgcgcatggtgctgaccacgttctccaccagcttgccgccctgttgcgcggtctgcgaggcgtcggtggccagctgattggcatgatgggcgttgtcggcgttctgtttcaccgtggcggtcagctgttccatgctggcggcggtttcctcgaccgccgccgcctgctgctcggtgcgggaagagagatcggtgttgccggcggcgatttccgcggaggcggtggagacctggctgacccccatctggatcttctcaatcatggtgcgcagattttggctcatcgccgccaccgcgttcagcaactgccccaactcatcgcggcgggtgctggtctgcgcctggcgcagatcgccgctggcgatgcgttccgccatcgccagcgtactttgcagcggacgggtgatctgcagcgtgatgcgccaggcgataagcactccggcgataatcgcgatcagggtggtgatgcccatctgcagctgcgccaggttgatgttgctgcgcgtctgcgccaattcgtcctgcataaaggcgttcaccagcgtgccgatcgcttgtgcgcgttcaccgagctgtcggctgatctgctgctcgtgctcataggccggcaggtaggccgcgatacggtttttgtaatcgtccagggcggccagcagcggctgcagctgcgggcgctgcgcgtcgctgacccggcggctcaaggcgttggccgcgtcgcgcgcgtcgtcgatggccgccatcagcggcgcttcggtttccttgttcaggctcagcagcagaccgcgcgcgccgtagcgcacctgggtcagcttctggttcagctggatgaaggccaactgcagatcgccgttggtgagctggcgctccacctggctcaggctggcctgcacttccgacatgttccagctctggcgcacggcgtctttcgccgagaccgcctgctcaaagattttttgctgttgctgatattccccaatcagtgtcaccagacgctgcagatccttgcggctttgggcgtcccaatccagcgcctgcccctgatctatcagtttgacggcgttttcaatattggcgcggttgttctgcagatactccggctggtaggtctggccgtacatggcgcggttgtatttggcctggttgatctcctcgttcagccggttgctgaagtcgatgcgatcggcgcgggattcgatgatgtgcagatattgcgctccggtgccggcgatgacgaccgccaacagcagcaacagcgcgaagccgaggccgagctttttacctacggtgagatgggtgaactttcctgccaatgcttgcaatgccgccatagcgtttttccttctccgggcgaacgtcaattgaacaaaccatcggcaggaagtggtcaaactttagcggatttcaggcaaaaaaatacccgccggcggcgggcatcttcatcaacaggggcgaattacttcttcgcggcgaagcgcgcggcggcttcgtcccagttgaccacgttccagaacgccttgatgtagtcaggacgtttgttctgatatttcaggtagtaagcgtgttcccacacgtccaggccgatgattgggaaaccggaagcgccggcgacggcttcgcccatcagcgggctgtcctggttggcggtagacactacggccagcttgccgtctttcagcaccagccaggcccaaccggaaccgaagcgggtggctgcggctttctcgaactcttcctggaatttctcaacgctgccgaaatcgcgctcgatggccgctttcagatcgccgcccagcgtggtgccggttttcaggtttttccagaagaagctgtggttggcgtggccgccggcgttgttacgcatgaaggtgcgtttgtcggcaggcactttatccagatcctggatcagctcttcaacgctgtatttggccagctcagggtaggcttccagcacggtgttggcgttgttgacgtaggtctggtggtgtttggtgtgatggatttccatcgtctgcttgtcgaaatgcggttccagtgcgtcgtaagcgtaaggcagggatggcagtgaataactcataatcatcatctccagtggtgtatgggcggcgcaaagggcgagcaccgcgtaagcagtcggatcattatagttaattaaatgatattgaaaatgattatcaatgccctgtgaactgtgtggttaatgaacaaatcgttgcgttaacatgctgatagaagagggcgctggggtgccgcgtcgaaccgccgccccggcgcgttggttactctctatactgtagggagcgccaacgccgaaatgtatcgaaatgtgccaatgcgttcactgaatgagcacgagtgtgtaacaaccacaagcacgctgtggtaatatggccggcgttcgtagcaagcataacaacagtgacattcgcgtttgccgcgctagcgggcaggcgcatttgaacaatgtgacaatcgagagtaaaggagacccccatgcaggtcagcagaaggcagttctttaagatctgcgctggcggtatggcaggaacgacggtggccgcgctgggctttgcccccgaagtggcgttggcggaaacccggcagtacaaactgctgcgcgcccgcgagacccgtaatacctgtacgtattgttccgtcggctgtgggctgttgatgtacagccttggtgatggcgccaaaaacgccaaagaaagcattttccatatcgaaggggatccggatcacccggtaaaccgcggcgcgctttgcccgaaaggcgccggcctggttgacttcatccacagcgaaagccgcctcaagtacccggaataccgggcgccagggtcggacaaatggcagcgcatcagctgggacgacgcctttacccgcatcgccaagctggtgaaggaagaccgtgacgccaacttcatcaaaaccaacgaccagggcgttaccgtcaaccgctggctgaccaccggcatgctgtgcgcctcggccgccagcaacgaaaccggttttctgtcgcaaaaatttagtcgcgctctcggcatgcttgccgtagacaaccaggcgcgtgtctgacacggaccaacggtagcaagtcttgctccaacatttggtcgcggtgcgatgaccaaccactgggttgatatcaagaacgcgaatttgattatcgtcatgggcggtaatgcggcggaagcgcatccggtggggttccgctgggcgatggaagccaaaatacacaacaatgccaagctgatcgtgatcgatccgcgctttacccgaaccgcatcggtggcggacttctacacgccgatccgctccgggaccgacatcgctttcctgtcgggcgtgttgctgtatctgatgaccaacaacaagttcaaccgcgaatacgtcgaggcctacaccaacgccagcctgctggtgcgggaagactttgccttcgaagacggcttgttcagcggctacgacgcggaaaaccgcaagtacgacaaaaccacctggaactaccagttcgacgagaacggcttcgccaagcgcgacgtcacgctgcaggatccgcgctgcgtgtggaacctgctgaagcagcacgtgagccgctacacgcctgacgtggtgagcaacatctgcggcacgccgaaggacgatttcctcaaggtgtgcgaatacatcgccgaaacctgcgtggcggataagaccgcttcgttcctgtacgccctgggctggactcagcactcggtcggcgcacagaacatccgcaccatggcgatgatccagctgctgctcggcaacatgggcatggcgggcggcggcgtcaacgcgctgcgtggccactccaacatccagggtctgaccgatctcggcctgctgtcgcagagcctgccgggctacctgacgctgccgtcggagaaacagaccaatctcgagacctacctgaaggctaacacgccgaaggcgctgctgccgggccaggtgaactactggggcaactacccgaaattcttcgtcagcatgatgaagaccttctacggcgacaaggcgcagaaggacaacagctggggctttgactggttgccgaagtgggacaaaggctacgacgtgctgcagtacttcgagatgatggcgcagggcaaggtcaacggctacttctgccagggctttaacccggtggcgtcgttcccgaacaaaaacaaggtggtggcttcactgtccaagctgaagttcctggtgaccatcgatccgttgaacaccgagacctccaacttctggcagaaccacggcgagttcaacgaagtggatccgtcgcagatccagaccgaagtgttccgcctgccgtccacctgcttcgccgaagagaacggctcgatcgtcaactccggccgctggctgcagtggcactggaaaggcgcggacgccccgggtgaagcgctgaacgacggcgagatcctggcgggcatcttcagccgcctgcgcgagatgtatgcgcgcgacggtggcgcggtgcctgagcaggtgctgaacatgacctgggactacctgacgccggacaacccggcgccggaagaggtggcgcaggagaacaacggcaaggcgctggcggatctgctggatgccgacggcaaagtgctggtgaaaaaaggcgaactgctcagctcgttcgcgcaattgcgcgacgacggcaccaccgccagcggctgctggatcttcgccggcagctggacgccggccggcaaccagatggcgcgacgcgacaacgccgatccgtccggcctcggcaatacgctgggctgggcctgggcatggccgctcaaccgccgcattctgtacaaccgtgcctcggcggatccgcagggcaaaccgtgggatccgaaacgccagctgttggagtggaacggcgccaagtgggtcggggccgatatcccggactacagcaccgccgcgccgggcagcgacgtcgggccgttcatcatgcagccggaaggcatgggccgcctgttcgccaccgacaagatggcggaagggccgttccctgaacactacgagccgttcgaaacgccgctcggcaccaacccgctgcacccgaacgtggtgtccaacccggcggcgcgcgtgttcaaggacgatctggcggcgatgggcaaatccgacaagttcccttacgtcggcaccacctatcgtctgaccgagcacttccactactggaccaagcacgcgcggctgaacgccatcgcccagccggaacagttcgtggaaatcggcgagaagctggcggagaagaaaggcatcaagcagggcgacaccgtgaaagtcagctccaaccgtggctacatcaaggccaaggcggtggtgaccaagcgtattcgcacgctgcaggtgcacggccaggaagtcgacaccatcggcatcccgatccactggggttacgaaggggtggcgaagaaaggctttatcgccaacacgctgacgccgttcgtcggcgacgccaatacgcaaacgccggagttcaaggcgttcctggtcaacgtggaaaaggtgtaacggagacgaattatggccatgcaatctcaagacatcattcgtaaatccgccaccaatggtttcacgccggcgccgcgcgcccgtgaccaccaggaagaagtggccaaactgatcgatgtcaccacctgtatcggctgcaaggcctgtcaggtggcctgttccgaatggaacgacatccgcgacgaagtggggcacaacgtcggggtgtacgataaccccgccgatctgaccgccaagtcgtggacggtgatgcgcttctccgaggtggaggaaaacggcaagctggaatggctgatccgcaaggatggctgcatgcactgcgccgatccgggctgcctgaaggcctgcccgtcggaaggcgcgatcattcagtacgccaacggcatcgtcgacttccagtccgagcactgcatcggctgcggctactgcatcgccggctgcccgttcgacgtgccgcgcatgaacaaggacgacaaccgggtgtacaagtgcaccctgtgcgtcgaccgcgtggacgtcggccaggaaccggcctgcgtgaaaacctgcccgaccggcgcgattcacttcggcaccaaggaagcgatgaagcaggtggcggcggatcgcgtcagcgagctgaatacccgcggctaccagaacgccggtctgtacgatccggcgggggtgggcggcacgcacgtgatgtacgtgttgcaccacgccgacaaaccgcagctgtaccacggtttgccggacaacccgagcatcagcccggcggtgaccttctggaagggcgtgtggaaacccctggcggccatcggctttgccgccaccttcgcggccagcgtgttccactatgtcggcgtcgggcctaaccgcgtcgaagatgaggacgagcacgacgagtcgcacgacgaggagacgcgcaaatgagaaaggaaaagcccattcagcgttacagcgcgccggagcgcatcaaccactggatcgtggcgttctgcttcgtgttcgccgccatcagcgggctggggttcttcttcccctccttcaactggctgatgaacatcttcgggacgccgcagctggcgcgcattctgcacccgtttgtcggggtgatcatgttcgccgcgttcctgctgatgttcctgcgctactggaagcacaacctgatcaaccgggaagatatcgtctgggccaagaacatccacaaaatcgccatgaacgaggaagtgggtgataccgggcgctataatttcggccagaagtgcgtgttctgggcggcgattatcagcctggtgctgctgctggccagcggcgtggtgatctggcggccgtattttgcgccgtcgttctccattccgctgatccgcatcgcgctgctggtgcattcgctggccgcggtcggccttatcatcgtgattatggtgcacatttacgccgcattgtgggtaaaaggcaccattaccgcgatggtggaaggctgggtgccggcggcctgggccaagaaacatcatccgcgctggtaccgtgaggtccgcgagaaacgacaggaagataaaccctgatgagtatccgcatcgttcctaaagagcagttaggggcacagcgtgagaagtccacaacggcggagaacatcccgccgttacttttcgccaacctgaaaagcctgtacagccgccgcgccgaacgtctgcgtcagctggcggtcgacaacccgctgggtgactacctgaactttgccgccgagctggcgcaggcgcagcagcatgcgctgcacgataacccgctggcgctcgatcttagcgaagcgttggcgcagggcgccgccagcggcaaaccgccgctcgatctgagcgtgttcccgcgcagcgagcactggcgcaagctgttgacatcactgatcgccgagctgcgcccgcaggcgccggagcacattctggcggtgctggacaacctggagaaggcctcagcgcacgagctggagctgatggccgacgccttgctcaaccgcgagtttggcaaggtgggcagcgagaaggcgccgttcctctgggccgcgctgtcgctctattgggcgcagatggccagcctgatccccggcaaggcgcgcgccgaatacggcgagcagcgccagttctgcccggtgtgcggcagcatcccggtctccagcatggtgcacatcggcaccgtcaacggcctgcgctacctgcactgcaacctgtgcgaaagcgaatggcacgtggtgcgggtgaagtgcagcaactgcgagcagactcgcgatctcaactactggtcgctggacagcgagcaggcggcggtgaaggcggagagctgcggcgactgcggcacttacctgaagatcctctatcaggaaaaagacccgcaggtcgaagcggtggccgacgatctggcttcgctggtgctggatgcccgtatggaagaagaaggcttcggccgcagcagcatcaatccgttcctgttcccggcggagtaaccgcccggccccgttcgcgcggggccggatgagcaatttcagaacgggcttctggcaatcgcccgggcgagttgctacgtttaggccataacgcgccaagcgaaaggaaccacgatgttaaacaccctggcaaaactgaccgcggtcgccgtgttggcggttggactggcggcctgcgacaacaaagacgacaccaaaccggcggtgccgccgccggacaccaagccgaccgtgacgcagcccgcgccaccgccgccgcctgcgccggtagaaaccccgcccgcgccgccggggctgaacgtgtcgctgcagaagggcaagatcaccttcgagctgccgccgggctttagcgatcaaacgctgaacagcggcatcatcaacgacagcacctccaccattcagcgcttccttgacggcaagtcgcgccagagcgcggtctcgtccgaagtgatcccgccggacggcatgaagctcaacaccagcgacaaaatgctgaaagagctgacgcagagcgccatcacggtgctggccgaacgctatcagaatatccagaccaccaaagaagagaacttcagcgtcggcaaacagaagtttcgccgggtggataccgaacagaccgtcaacgggcaaaaggtggtctccaccctggtgttgacggtgttcaacaagcgggtggtgacgttgcaaatgctgtcgccggccaaaacgccggaagtgcatcaggcgctggtgcagcggattatcgataccctggcggtgaagtaaggacgccgcagccaggacgaagcggaggagaccggatgaagcttatcggcagttacaccagcccctttgtgcgcaagatttccgtgatgctgctggagaagggaattgcgttcgaattcgtcaacgatccgccgtatgagcccggcagccgggtgaaggagttgaacccgctcgccaaggtgccggtgctgatcgccgatgacggcgaggtgttttacgactcgccgatcgtggccgaatacctcgagctgctggcggtggagccggcgtttttgccggccgaacgcgccgccgcgttgcgcgtccggcaggtggcggcgttggcggacggcgtgaccgaagcggcgacgacgctgttccgtgaaagccggcgcgcgccggaaaaacaggacgaaaactggatgctgcgccagcgtgacaagctgacgcagggcctggacgccctggaggcgctggcgcgggaaaaaacgtggctcaatgccgagcggctgacgctggcggatatcgccaccggctgcgcgctgggctacctcaattttcgccgcatcctgcccaactggtgcgtcgaacgcccggcgctggtcaaactggccgaacgcctgttcgcccgcgaaagtttcgcccgcacggcgccgccctgagctttcctttctccccgccgcggcggggttttgctatgccgatacgtttaaactgaaaaccgagcgaccatgagcactgaatcccaccttctttacagccaactgcccgctatcgaccgcctgctgcgtgaacccgcgattgaaccgctggtggcgcagcatggccagacgctgatcggcgaactgctgcgccggctgcaggcccaggcgcgcgacgcgatcaaacaacggcaacgcttgccggcctggtgcggcgactggccgcaggcgctgcgggacgagctggcccggcagcaacgcccggctttgttgccggtgttcaacctcagcggcaccgtgctgcacaccaacctcgggcgcgccctgctggcgcagccggtgaaggatgcggtgaacgcggtgatgggggaggcggtgacgctggagtacgatctggacggcgccgggcgcggccatcgcgatcgggcggtggcgagtctgctgtgccggctgaccggcgcggaagacgcctgcatcgtcaataacaacgcggcggcggtgctgctgatgctggcggcgatcgcccccggcaaagaggtggtggtgtcgcgcggcgagctggtggaaatcggcggcgcgttccgcattcccgacgtgatgcgccaggccggctgtcaattggtcgaggtcggcaccaccaaccgcacccatctgaaggattaccgccaggccatcaacgagcagactggcttgttaatgaaagtgcacaccagcaactacagcattcagggctttaccgcggcggtcgacgaggccgaactggcgcagctcggggccgaacagggcgtgccgaccgccaccgatctgggcagcggctcgctgatcgatatggcgcagtacggcctgcccgccgaaccgatgccgcagcggctgctggccgccggcgtcgatctggtgacgttctccggcgataagctgctgggcggcccgcaggctggcatcatcgtcggcaaaaaggcgctgatcgcgcgtttgcagcagcacccgctcaaacgcgcgctgcgcgtcggcaagctgacgctggcggccctggaggccacgctgcggctttatttgcagccggaaaaactggctgagcaactgccgacgctgcggctgctgactcgcccgcagcaggagatgcaacagacggccgagcggctgctgacggcgctgacgccacggttcaccgccgatttcgacctgcgcgccgaaccgtgctggtcgcagatcggcagcggttcgctgccggtggatcgcctgcccagctatgccctgaccttcacgccgcgcgacggccgcggtgccacgctggaagcgctggccgaacgctggcgccgtctgccgcagccggtgatcggccgcctcggcgacggccggctgtggctggatctgcgctgtctggaacaggagggggcgctgatcgcagcgctgagcgcatcatgatcatcgccaccgccggccatgtcgatcatggcaaaaccaccctgctgcaggcgatctccgggatcaacgcggatcgcctgccggaagaaaagcgccgcggcatgaccatcgatctgggttacgcctactggccgcagccggacggccgggtgctgggctttatcgacgtgcccggccacgagaaattcctcgccaacatgctggcgggcgtcggtggcatcgatcatgcgttgctggtggtggcctgcgacgacggcgtgatggcgcaaacccgcgagcatctggcgatcctgcgcctgagcgggcgcccggcgctgacggtggcgctgaccaaggccgaccgggtggacgcggcgcgtgtcgatgaagtgcgcagccaggtgcgcgacgagctggcgggccagggctggcccgatgcgccgttgttcgtgaccgcggcggtggcgggcgagggcatcgaggcgctgcgcgcgcatttgctggcgttgtcgcccgctgaacatgcgctgacgcgccgttttcgcctggcggtagaccgcgcgttcagcgtcaaaggggcggggctggtggtgaccggcaccgcgctcggcggccgggtgaaggtgggggatacgctgtggctgaccggcgccgacgcgccggtgcgggtgcgcggcctgcatgcccagaatcagaccgtggagcaggcgcaggccgggcagcgcattgcgcttaacatcagcggcgatgtcgataaagagcgggtcgcgcgcggcgattggctgctggcgcagcgtccgcacgaagcggcggaacgcattctggtggcgctggagacggatcggccgatccgccattggcagccgctgcatctgcaccatgccgccagccacatcaccgggcgcatttcgttgctgaacgacgggctggcggaactgatcctcgatcgtccgctgtggttggcgcagaacgatcggctggtgctgcgcgatatcggcgcgcggcaaacgctgggcgcggctcgggtgctcaggctgaatgcgcccaagcgcggcaagcgtcagccggactatctggcatggctgcaggccctggcgctggcgcaggacgatgcgcaggcgctggcgcttgaattgccgcacggcgcgctgtcactggcggcgttcgcctgggcgcgtcaattgacggacgatggcttggacgagctgctggcgaaccgcgatctgctgatcgtcggtgaccgggcgctggcgcaggatcaggtgcaacaggcggaaagccgcctgctgcaggtgctggcggagtatcaccaacagcacgccgatcagctgggcttagggcgcgcccgcctgcggcgcatggcgctgccgcagcagcctgaagcattggtgtttatgatgatcgatcggctgctgcgggccggcgcgctgcgcaatacgcgcggctggctgcacctgccggaacacggcctggcgttcagcgccgaagaggcgccgctgtgggcgcgcatcgaaccgctgttcggcgacgaaccgtggtgggtgcgcgatctggcgagcgaattgggcgaggaagagagccgggtgcgcgcgctgctgcgcaaggcggctcagttgggccatgtgacggcggtggtggtggatcgctattacctcagccgacgcatcgatcagttcgcggcgctgatccgcgagctggatgcggagcgcgggggcgccaacgccgccgatttccgcgatcggctcggcgtcgggcgcaagctggcgatccaggtgctggagttcttcgatcgcagcggctttacccgccgcaagggcaacgagcatctgctgcgcgacggcgggttgttcggtagcgagtcccctacccgataaacctgacggcggcccggctgacgtcgggcgtttgggcggtgagaaacgcctgtaaacgttcgatcagcggccgttttgccgattcttccggccataccagatagtaaccgtcgccggtgcgcacggcgacgtcacaaggcagcaccaataatccctcctcaatcgtccgcaggctcagcgccagatcgccgatcgagacgccgtgcccggcaatggctgccgcgttgccctgttccagcgaatcaaatacctggccgcgcatgagatcgatcggggccgcgatgccgcttttctgcagccagcgccgccagtcgcgccgatcgggcgacgggtggatcagcgggcaggcggcgagatcccgctgcccgtcggcgagcagcgcgggggcgcaaatcgggatcagccattcgtcgaacagcttggcggcggcggtattggcgccaaaatggccgttgccgagcaggatggcgcagtcgtagggttcgctgaaaaaatccacgctgtcgatgtccatccagacgctggctgcctgcacctcgaacgcctgcgccgtttgccggaaccggctcaggcagtccagcagccagcgcagggtcagggtggagggcgccttcagccgcagcagatcgcggtggcttctgaacagctcgcaggcttgctcgatgcggccaaacccttgctgcagctcggcggcgaagattttcccctgcggcgtgacctcgatacgcgggccgttgcgctggaacagccggcagccgaagtgctgctccagcgttttgatgtgcttgctgaccgcgctcggggtgagatgcagctcctcggcggccagcgtgaacgagccggtgcgggcggcgctttcgaaggcgcgcagggcgtaaagcggcggaagggaactggccatcgcggcgtctctaataatgagtctgattcacagtaaacgacaggattactcctttttcaaggcgggggcggcggcatgataatggcgcgacgccaactgactgaatgtgagtgaaataaagatgaacctgtcgttgctggcggcgtatttcgccgccattttgttgctgatcgccacgccggggccggtggtggtgatggtggccaacaccgcggcgcgctttggcgcccggcgtgcgctgttgaccgcgctgggcagcaacggagcctccttgttgctgatcggcgtcgccgcgctgattatcaccgggctgttcgccgtggatatgcgcttgctgcagtggataggcctgctgggttgcctgtttattggccgtatggcgatcgtctcgctgtatgaggatttatccgcgcgagcccccgatgcgcagcccgttgcgccgccgcaaaaacgctcggcgatcctgaacggttttctggtgggcatcgccaaccccaaagacattatcttcttcgtcgcctttttcccgcagttcatcgccgtcaccccctcgatcggcgccagcctgacgctgctgaccgcgctgtgggtgctggcggacttcgccattttgctgacctatatcaccctgctgtcgggaacggcgctgcagcgcgcgcggcgggcgatctctgtcctgtcggcgttgctgttgttggcggtggcggtggtgggaacggggtatgcactgtgggggttgctcggctgaagccgcataaaaaacgccggtcgggaaaccggaccggcgttttatcgtcgcgtttacgccgcgccgttcggctgcggcgtggggtcgccgttgcggcgtttgccgaggaacagcgccaccagcgtcagccagcacaggccgctgatgaggttgaacaggttgaacagcccgctgccgccccagacgtaggcgaccttggccagctcgatgccgacggtgaataccatcatgctcagcatgcccatagtggccgacaccgtgcccttgctgacgttgctggagaacagcgtcaggcggtacagcccggcgttggccaggccaatgccgaaggcgtacagactcaggccggcggtcatccacaggtaggcgtggctggagaactgggtcgccagcgcggcgatcagcagccctagcagcatcgggcccgcgcccagcttgatcaggcgctccacgctgttcttgccggtcaggcgcgccagcgtcaggttgccgaggatcagcgcgccgaacaccgggatctgcagcaggccgtagtccaacgtcgacagcgactcgccgctgatcaggatcaccggcgactgggcgatccaggccagcagcggcaggctggcgaaaccgatcgccagggcgccgcacaggaagcggcggttgcccagcacctggcggtagtcgcgccacaggttggcggcggaaaacgcctcgccctgcagcgtggcggtttccggcatcgctttccacaggccgtagaaggcgatggccgccagcgccgcaaacagcacaaacatgctctgccacggcgcgacgtggatcaacgccgcaccggccagcggcccgagcagcggggcgatcagcgccacgttagccatcagggcggtgattttgatgcacaccgcctcctcgaacgactcctggatggtggcgtagccgaccgcgccgataaagcacaggccgatgccctgcaggaaacgcatggcgataaactgctcgatggtggtgaccagcaggatcgccaggcaggagacgatgaagaacgccaccccggccagcatcaccgggcgacggccgcgacgatccgacagcggcccgagcagccactgcaggaaaatgccgccggccagataggcggtcattgaggtgggcacccactcttcgccggcgttgaaatccgccacgacggccagcatgcccggctgaatcatatcgttgccgatataggtggcgaactcgaacagcaccagacaaagagggaataaaagcgcctgccggcccaaacgtgccgcaggtggtaatgtcgttttcatattattgtactgatagtaaaagagaaaaaggaactgccagggcgggaagcgcaaactgagcgagttgtggcggctattttgccgccaattgttcaccttcgcaatcataaggtgttgtttaagtgcattctgatatttcgcttttgggttgtcgcctaacgccgtgcccgataacctcttcttaacatatcaatatgacataagatcgggcgagcgtttgagcgagaaaatcggctggatagacaacctgcgggcgatggcgtgcatgatggtggtgatgatccacgccaccacctattacgtcaccaacggcgcggcgatagggttgcacaactgggacatcgccaacgtactgaactcgctgtcgcgcgtgtcggtgccgctgttctttatgatttccggctacctgttcttcggcgaaaagagcgccggccggcggcatttcacccgcatcatctgctgcattctgttctacagcgccatcgcgctgatctatatcgcggccttcaccaagatcggtttctggccgtcgctgcgcggcatcctgcaaaagccggtgttttaccacctgtggtttttctacgccatcgcggtgatttacctgctgtcgccgctgatcagcgttaaaccggtgtcgcgtcgctacctggccgccgcgttggtggtgttggcggcgatcgccaacccgaataccgacaagctggccttcggcaacgcgcacctgctgccggttaacctgtatatctacggcgataccttctactacctgctgtatgcgttggccgggcgggcgattggcatgatggaggcgcgcgggcgcgccgtgggctggttggcggcgtttggatttgcgctgtgcgtggcgctgatcgcgcgcggcaccaagcatcagctgttcatcaacggcaacttcgccgatacttactacatctacagcggcccgctggtgtttatggcggcggtggcgctgttggtgtgggtgaaacactgtttgccgcagccgatcggctggctgagcgtattttcccgccattcgctggcgatttacggttttcacgcccttatcgttaacgtgatgcgcagccggcacctggatttcaccggccacccgctgctggatatcttctgggtgttcggcgtggcgctggggggcagcctgctgctgtctgtcggcctgcagcggctggatacccgccggctggtgtcatagcggcgagcgctggcgctgctgggcgcggcgcagctgccgcccggaagaaaaaccggccgccagcgcggccttctccaacccatacccttgctgcaggcgctgttgcgccaccgccaaccgcagctgctcatgatattcccgtacgctgatgccgacgtggctgcgaaacagccgcgccagatggcggctgctgacgtgcgccttctccgccacctgcggcaccgaccagtcggcttccggctcggcggccatcacgtcctgcgcgcggtgcaccgccgggtgcaggtggttgcggtagcgcagccagggcgacagctgcggatcgtcgccggcgcggcggaaataaaccaccatgtcgcgtgcgacgtcgcgcgcccggccggagccgcagtggcggtgaaccagatgcagcgccaaatcgatgccggtggtgatgcccgcgctggtatagacgccgcggtcttcgacgaagatgcggttctctttcacctgcgccgccggcgcctgcaggcggatacgttcgatgacgtcgtggtgggtggtgcactgatagccgtcgagcagcccggcctgcgccgccagcagcgcgccggagcagatgcacaccagggtgatgcgctgccgctgcagatcgggccgcagcgtcgccagccagcggcgggcctgctcggcctcttcaccggcgaaatagcgctgcgaatcgccgacgcccggcagcaccagaatggcgccgtcttccaggcgttcgggcaacggctgcaggccgctcagcgtcatgccgatggagcagacgacctgcggcgccgggctgaggtaacgcaggctgaacgacccggcgaggcgcagggtttccgccgggccgctgacgtcgagcgacagcacgttgggcaaaagcagaaaatagacggcctgcggcatggttactcctgtgcgagttgcgccagcgcctcatccacgctggcgatgcgggcgaaacgatcgaccagtacggtttcagtatgccgcttcagctgcgcgggggtaaagacttcaccgtcgggatggcgcatcgggaaggtcagcatcgcctcggtgacgaaggtcacccgataaccgagatcggacgccacccgggtggtggtttcacagcactgttcggtgcggatgccggagatgatcaggtggttgatatcccgctcgcgcagccaggcgtcgaggccggattcggtcagcgcattgtgtacatgcttatgcacggtgatatccgcctggtgggtgaggaacggcaggcgctgcacgtggcctgaagccagcgagaacggcccctgcggcgagacgtgcagcacgtcgaccagcgccgcgccgcgttgctgacagcccgcgatcagacgggtcagcgcctgttgaaacgccggcagatcgtcctcctgccagaatggacggtgctggaatgattgctggacatcgatgatcaataacgcgctctgtgacattttcggccctccgccagtgtgtgtagcgaccatattgcgccgctcattactctggcagaaggccaaaaacggccatcatgatgacaacagcggaccgaccttaggctttgctcacctggccagccaccaggcgcccctgatggaaggtggcgctgcgcgccggcaggcgggcgaccgcctcggcggaacagctggcgttgaccagcacgaactcggcggcatcgccagctttcggccaggcgcgctggcccttctcgtccagcggcagcacgccgccggtggcgatggccatggcgcgtgacaggtgatactcgtcggaaccgcggtacagctgggcgtacagattggccttctccaggatgtcgccggtgccgaacggcgaccagtggtcgatcacgctgtcggtgccggtcatcacgaacacccctttctcactgagctgcggcagaggcatcatcaggccgccgatcggcaccgtggaggcgatggtgatctgctgcgccgccagtcgggtggcggtttccgccagttcgcccggcgtcagcgtggtcagggcgaaagcgtggctgatggtgaccttgccgcgcagcgccgggtttttctccacggtggcgatcatgtagttgatggcggcgaccccggccgggctggtttcatgcaggtggatatccacgcctttgccggtatcgagggcgatctggaacatggcgtccagcgatttctccatcgcgccgtcgacgttggtcggatcgagcccgccgacgtactgcacgcccatctgcatcgcttcgcgcatcagcgcatcgactttggagtgcagcaggccgtgctgcgggaaggcgacgatttcacagctgaagtccgcccggtggttttccagcgcgcgctgcaggtgctccaggcttttcaggccgctgaccggatcgatattgcagtggctgcgcgccacggtgctgcctttggactgcagcagggcgatcagattttccgcccgctgctgcgaggtgggcagcagtttcgggatcagcgtctgctccagcgcgatcatgtccatgatggttttgccctggcgcgggcgcggcgcttgccacgggccgctgtagaaggttttgtccaggtggatgtgcatatcgcgaaacgccggcagcagcagccggccctgcgcctgatagcggggcacgccggcgggcaacgcggcgttggcggcgtgaatggcggcgatcttgccgtctttgatctcaagcgtgtatagcgcggtgcgggtgccgatcaccgtgtcgccgtcgtattcaaagccgtcttccagccgcacctcgctcaggcagtagtggcgatcggtcagggtcatcggcgttggcgcacactgctcgccgccaggagacgcggcctgtgccacgccaccggtcaggccgatcaccgcgcaggcggtggtgagtttgccggtttggctgaggaaggctctgcggcccggttgttgagggttttccacgttcggttccttaatccagaggtgagggagtgaaaacatcccccaatttaggagaggaagcggccggttggcagcgacatttgccactggtgactattcgatttggtaatgaccggcgtgcgccggggcaaggattttcctggcttgctctttcgtagctttaatggctacatttgtagtcattaaagctacattgaggttagcgtgatgcacgaaccgatgctcgagctgctgttcagcgaataccgtagaaaagtgctaagcctgctgtttattgagcccgggcgagcgtttcacgtgcgggaaattgcgcggcgtaccgcaactcaggccgggactttacataaagagttgagcaggctggctgaggggggcattttgctcaggcagcggcagggcaaccaaatttgctatcaggccaacgctgattgcctgattttcccagagctggcggctattttccgcaaggcttgcgggccggcggagcgcttaaggcagacattggcagcgtttggcgcagctattgaacgggcctttatttttggttccgtcgccagtggcaaagcgacggcggccagtgatatcgatgtgttgatcgtcggtaaactgtcttttgcggatgtggttcaggcggtttacccgctgcaggaaacgctgggtcgggaaattaaccccaaactgtactcgccggaagagtggcgggcggctttggtcgagaactccgcgtttatacaggacattatgcagaaaccccaactttggattgcgggagacaaggatgacgctggacaatctggtcgggctgggactggaggtgataacgcctgacgcaggggcgattaaaaaattgctggccgccgccgcgcgcaaccgacgcgatgcggatatcactcagctcagcaatgagagccgtttcgacacggcatataaggcgatcatgcaaatggcgaatgccgctttacaagccaaggggtaccgtacgttgatcagcaaacccggtcatcaccagaccatgatccaaacgttgccgctcaccgtagggttgccgcgcgaggcaatgatctgcctggatgcattgcgaaaacagcgcaatgtggcggattactccggcgatttggtgacggacgcggcggtacaggcttgccttgagcagaccaaagcgctgtgggtacggattatcgactggctgcagcgtgaatccccgccgatagtggcgtaagcgatctcacttcaacccgcaaaacaccgccagtggcaccggcgattgctcgatggccgggaaggccaggctgtccagccacagcagcggttccggccgcgcggcgcgcggcggttgccggcggcgctgcttcaccaggatcagatccagctcttcacgcgcgtaggcgctgtgcagatcggcgctcaggccgctggcgacgtccagccgcaggtgcgggtgctcgcggctgaattccgccagcagctcggtggtgggcacggcgaaatcttccggcataccgatccgcagcacgccgtcgcgccagatgccggtcagcgcgtcgtgggcttcttcattcagcgcgatgatgcggcgcgcgtagctcaacaacttgacgccttcttcggtcagcagcacctgatgcgaggagcgttcaaacagcggcttgcccagcatctcttccagccggcgcacctgctggctgacggtggactgcgacaagaacacccgctctgcggcgcgggtgaagctgttgctgtcgcacacggcgacgaagctgagcagcagctgcggattgaacatcgggtagcgattcattttcccactgttggctattttattatttaatttcccaatactagcggcgttgcctacagtaacgcaacgctgcggcgatcgcgctgtgacgccgcactcttcatttcgcagtaccaggaatataccgtgttaaatcattctgttaattcaccttctccacgtcgctggctcaatcctttgttgctggcgctggtgttgatcggcctgaacatgcggccgctgttgacttcgatcggcccgttgctgccgacgttgcgccaggccaccgggctgagttttggcggcgcggcgctgctgaccacgctgccggtgctgatgatggggctgatggcgctggcgggcggcgccatcaaccgactgttcagcgaacgcagcgccgtggcgttgagcctgctggcgatcgggctgggcgcgctttggcgcgaactggcccccggcagcgtgcaactgttaatgagcgcggtgctgggcgggctcggcatcggggtgatccaggcggtgatgcccggcatcatcaagcatcacttccttaaaagcatggcgctggtggccgggctgtggtcggcggcgctgatgggcggcggcgggctgggtgcggcgatcaccccatggctgatgagtacggggcgcgactggcacagcgcgctggcctggtgggcgttgccggctctggtggcgctgctggcctggtggccggtcagccgcgggctgtctcgcctgggcgcggcgggcgaacaccgcggcccaagcctgctgcgcaaccggcgcgcctggctgctcggcgcctatttcggcctgatcaacggcggctataccagcctgatcgcctggctgccgccgtattacatgcagctcggctggcagccgcaggccagcggttcgctgctggcgctgatgaccttcggccaggtattgggcgcgctgctgctgccggcgctggcgcgcaatcatgaccggcggccgctgctgctgctggccttgatgatgcaactgatcggctttatcggcctgatttacctgccgcaaacgctgccgtggctgtgggtgttggtttccgggctggggctgggcggcgcgttcccgctgtgcctggtgctggcgctcgatcacctgcaccagccggcggcggcagggcggctggtggcctttatgcagggcgtcggcttcctgctggcgggcgtgacgccctacctctccggcctgctgcgtgactacagcggcggcttcgtgctggactggcagatccacgcgctgctggtggtagtgctgatcgccattacctggcgcttccacccgcacagctaccggcgggcgttcgccgaataatatttctgtcattgccgctccctatagtgacgttgcttttacttctgggcgataacaacgaaaagggacaatgacatgcacaacaccaaaacccggctggcgctgctggtcggctgcatggcgctgagcgccaacctgtgggccgaggcgcagccggtgcaggcgatgctggccgggcatgcgctgctgccggtaaaatccgccgttgccacaccgaaggatgcgccgagcgatctgcagcagagcggcaaatacaccagcggcaaacgcgtcaccgagctgggcagcgtggcgggcaaatccgccgatcgcctgaccgggatcggcctgccgatcaacggccagccgctgcagggccactccggcatcaaacacatgcccgacggcacctactgggtgctgaccgacaacggtttcggcagcaaggccaactccccggacgctatgctgtacctcaaccactacaagatcgatttcaaagacggcacggttgcgccgctgaagacagtgttcctgcacgatccggataaaaaggtgccgttccacatcatcaacgagagcaccgagcagcgctatctgaccggcagcgatttcgatccggaaagcttccagtttgccgacgatgccttgtggatcggtgaagagtttgggccttacctgatcaaggccgacctgaacggcaaagtgctggcggtgttcgacacccaggtggatggcaaagtagtgaaatcgccggacaacccgacgctgaccctgccgggcgcgccggacggcaagcagaacttccaggtggcgcgttccaagggctttgaaggcatggccgcctcgccggacggcagcaagctgtacccgctgctggaaggggcgttgtgggacggcgagcagttcgagaacgtcggcggcaaacgctacctgcgggtgctggagttcgacgtcaaacggcaggcctggaccggccgcagctggcagtacgtgctggaagacaaccagaacgccatcggcgacttcaacatgatcgacgccacccacgggctggtgatcgagcgcgacaacggcgaaggcacgccggacaaagcctgcgccgccggtgcgccgaccgacaactgcttcagccaggtagccaagttcaagcgagtgtataaaatcgctttctcggacgccaacgtcggcaaaccggtcgagaaactgggttatatcgacctgatgaacattcaggatccgaacaagctggcgcgcaagccgctgaacgacggcgtgctgaccttcccgttcttcaccatcgagaacgtggacgtggtggacgacaaccacatcatcgtcggcaacgacaacaacttcccgttctcctccagccgccagcctaatatggcggatgacaacgagttcatcctgctggacgtgaaggatttcctgaagtagcgctccccggccgccgaatcgccggcggccgccatttcccgcttagcgcagcgaacaaactgcgctataatcagcgccttgcttccctcttctccaaggaagatcctcgtccccggtggggcggccggacttcaaatccggttggggccgccagcggtcctgggcaggttcgactcctgtgatcttccgccaaagattgtccgggtagttcctgaaaagtccattaaaatgcataaaatcaatttgttatatggttttattgtccgctggtgtccgtgcgttaccgcctgaatccgagaaaaatgtgtataatggtgcgtataatgtttttatacacagaatccacttatacacatgctcctaactgacatacaaattcgacgttccaagccgcaggaaaagccctacaccctcaacgatggccaaggcctgtctctccttatcaacactgacgggagtaaaggttggcgttttcgctatcgctatgccggaaaagccaagctaatgtcctttggtacctaccctttggtaacgctggccgacgcgcgagaaaagcgcggagaggcccgtaagcaagttgctaatggcattgaccctgtagccgagaaaaaggcgcaaaagctcgctcggaagctttctgttgagaattcctttgaagctattagccgcgagtggcacacgaacaaggctaaccggtggactctggcctacagggaagaaatcatgcgtacctttgagcaggatgtgtttccgtacattggtcaacgtccgattgcagaaattaagcccttggagctgctggaagtgctacggcgcattgagaagcgtggggcattggaaaagacccgtaaggtacgccagcgctgcggagaggtattccgctacgccattattaccggtagggcagaatataacccagccccagatctggccagcgcattagccgttcccaagcaaaagcatcacccgttcctttcggccgaggaactgccttattttgttaaggatttggagggatataccggcagcatcatcaccaagaatgcagcgaagatcgttatgctgaccggcgtccgcacgcaagaaatgcgctttgctacatgggaggaaattgattttgaacggggtatctgggagattcccgccgagcgcatgaaaatgcgccgcccgcacattgtaccgctctctactcaggcggttgaattgcttaaacagctacaaccgatcacaggtcactatccttacattttcattggacgaaacaatcgtaggaaacccataagcaaagaaagcgtgaatcaggtaatagagctgcttgggtataaggggcgagctaccggtcacggtttcaggcatacgatgtctactattttgcatgagcaagggtttgactctgcctggatagagatgcagcttgcccacgtggacaagaacggtattcgcggtacctacaaccatgcgcagtaccttgagaaacgccgtgtgatgctgcaatggtacgccgattttatctcgggccttgctcgctagaaaatgccgccaataaatcgttaaaaccccttggcgcgcaatgctacccccgcctcgcctgcgcgctttctgtgtcgcttttcatgcacccgcatgagagaccgcaggccgcgccagtactggctcggatggggatgaaatgtgcattttcttgcatgcaaaatcatgcaccctatgcatgcacgcgcaatttgtggctggctagccaggaaaaaggctgttttgggcgaggcggaaggggaatgccccgcgatgctgtcgagagcggcggggcggagtgtgattagtgcagggtaggattgctgttgtaacggcgatagcggttcaacgtccgtttctccggcggtggcaaggcgttctcatcgaccggttgcgcttgtatcggctggcacagaattttatcgacgctttccaccgtcttgaatgtgcaagaacaggtcaggctctgacattggtaatacgcctcctttgtccgctccgtgatatagcggctggtacgggtataggacgcatgggtgcacagcgggcaacgcatcatgattgggctcctttttcttgcagccgacggcgtttttccgccagttctcttgcccctcgcatctggcgcattgggcatctttgtcgctcctgcaatacgccggtttgttccggtatcgtcagaccaatctcattcagcaccgggtggtcgatatttttcgtagccatggtagcgcgaatgcggccttgtagcgtgcccagtacctgtagctcaatcattttcatcggattgtccgcatagacgccgtaagcccgtgaagccagtgcgcacgccttgataacgtcagggctgataagcgccttgctcattgcatccactgcctgatgcatcgcatgagccgcaaaggtcgtgagggcgtctttgtgtgcggccaccaccttcggggccgtgccgccgcagcggaggtgaagctgcattttgtccagctccatctcctcaatcaggccgtcgaactccttcgccagcccccgcttggaaatccggctgtggtgctgcgcttgcagttccggcgtcatttctccgcgcagtttgcggaacagggtgcgccactggctttcagtctcatggctctgcacttcggtgtctttcttctgttggtggcagcgggcaatgccggttacgacatcggtcaacgcctggtagtttttgtcgtgggcggcgcgagcgtcgcgcagggcttgcagtttatcggtgatggatttcggtaaagcggtggtgctcatggtcgtgtctccggtatcagtcaatgtgaagctattctgctgaccgccgtacaacatcgccattcatcccggttggactgtccccaggacaacagccttgagtactgatgagaaaaccatcaagccatttttagttttacctaaaactattcactactgttcacttaaataaaaaatataggtaaatcagtagataagagggtgaatagttctcgctaaactcttcacccggtgttcaccactattcacccggcccaaaacgcccttttccctggctagcggtgtttggcggtttttccctattaatcaaccgtccatccatcgctcaggcttttcggccggtttgccaacaaaggtcaataaaggccaatataggccaatatgtccacttgattgaaaagtaagcataaaatctgttccaccacacaacaacaccttgttgccaccccggtaaatattcacataatagggcgctaccgaagttcacacagtcccggccagcgttggccggacaccaagaggtagcgtttttatgttgaccgtttccacccccaccccatccactctgtcaccggtgcttcctggcggttacaccccgcgcgagcgctttattcgcctgccggaagtgctctacaccaccggcctgtcccgctccaccgtgtacgagatgatgagccgccggcagttcccggctcaggtctccctcggcggtaaaaacgtcgcctggctggcctccgaggtcgagcagtggatggacgagcgtatcgccaaccgtcaccaggaggccgccgcatgatgcgattaacctttggtcgccagcacattaccctgagcgacaacgacgcgctgtttatcgcggaagctatcctgttacaacgcaaagagcctggtgtcgtcttgccggagcaccgcagcgaaaagcacggcgtcattcgtctggcgagtagccgggccgagccgcgcctgttccatgccgggccggtgccgctgacctgcgcggcggccgatacccgcaacgaccaactgaccgactgttgatcactatgcgatcgattgaacgtccgggggcgtcttacggcttgcccccctgtccggccttgcgctatagtcctcccgctgccgcaaaatcggcagccgggcgtggaaacccgtgtaacttactggcgacacaacacgcgccaggcgtgttttttttcgtcgcagcctttgtgcgctcattttttgcgcggtggatgttatgctaccgcagcagtcaatcaatggtggctcaggcggggctgacttcggtcaggccggtttccagtaaggccggtatttccacccccgtctgggctaccacccataagcgtggaaacttcggtggtagcaataaccaatacttgctggaggctgccaccatggctacgaccctcaccccgactcacccgacattctgctttctgtttgcggccgtgcgccgttctgcgctgacggcgtcaccgcgtatggtgcgcaccgtggcggattctgagcacaacgcccgccgcctgctggcccgtgattacgtgttgtcctttgccggtcgtctgccggttaaggcggtggcatgaacaccctggccgaccgctactaccgcgacacccattaccctatcccgcatgccgattttctgcgtctccagcatgcgcacgccaccggcgtgctgttcctcgacctgctggatacgcttgacctcggcgggcagcgccccgatgccacgcaacaggcatcgtttgcctcggtcattgccttgctgaccgaccagcttggccacgtcgtcaacacctgtgaaacccaaatccttgcccgcatggaggccaccgccgcatgaacactgcatcctgtttaccgattgaagtccgtaccgccgttttccgccgcgccgtggcacaagcctatctggacacctgcgccttttaccgggtgagcctcgggtacacgctggacgagctgcagatgacgattgccctgcgtctggaagggcactttgtgcgtcagtacggcgcagaggatggcatggacatggcgtgcaccatgctgagtgatatggtgcagccggacgttctggtggccgcgccgcgcctgaccgcgctggggcaaaagatgatggacgagctgtgctgcgagcgcctgtcggcggcacagaacgccaccgtacactgaggagaaaaccatgagcgcccagttcgtttcccagaccgtacgtaccgccactggccactggccggtgatactcccggccctcggcattgccttgcagccaaacggcaagccgcagccgtgcccgacctgcggcggcaaagaccgcttccgcttcgacaatcaggacggacgcggcacctggttctgtaatcagtgcggggccggtgacggcctcaacctggtggaaaaggccctgtcactgtctgcccgggctgccgccgaacaggtggctgccgtgatgggggataatgccagcactttaccaccggccgctaaggccggtcattcaccacaagacaaggccgaggcccagcgcaaggccgcgcgacaggcacaggctctggtggctgccgctcagtcccagaccggcaacgcctatctgagcgccaaaggctggccggaggcagaaaccctgaccttgcaggggcaaccgctgcgcgttggcggtatcaccttccaccccggcgacctgctgttgccgctgcataatgccgagggtgaggtggtcaacgtgcagctgattaacgccaacggtgataaacgcatgctggcaggcgggcaggtgaaagccgcctgccacattctgaacggcccggacagcgcggttatctggctcaccgaaggctacgccaccggtctcaccgtgcaccgcctgaccggtgagacggtgtgcgtggcgctcagcgccaacaacctggcggccgtggcggagcaggtacgcagccactacccggacgcacggctgctgctggcggccgataatgaccgcagcggcaccgggcagacccgtgccgccgaggcggccgcactcaccggcggcactccggcgctaccgcccacggagggcgactggaacgacgtttatggccgggaaggggcagacgctacgcgtgcccagctccgggcgttcagccagccgccgcagcccagcccgttcgacacgctgagcgatgccgatttgaaagccatgagcgccagcgagaaagccgaactgctggccgagcactacggcaacaccctggcggtgccaccggtgggggaagagctgtgccgctatacgcgtggcgcctggcaggtgctgccgcaccggcagctgagccgggagattgccgcattgttccagaaggtgcgcgcaccgttctccgccgccggtatcaacagcattttggacaccctcaagctgatggttccgcagatgggcgacccggcccgccggttgataggctttcgtaacggagtgtttgataccgttagcgggcagttcagcgcccaccggcaagagcactggctgcgcaccgtcaacagcgtggactatacgccgccgcgtgccggggagaacctggccgaccatgcgccgcatttctggcagtggctgacgcgggccgccgggggcaaccacgataaacaggagcgcatcctcgcggcgctctttatggtactggccaaccgctatgactggcagctgttcctcgaagtgaccggccccggtggcagcggcaagagcgtgatggcggccatcgcccggttgctggccggtgccgacaataccacctctgccaccatcgataacctggagtcggcgcgcgagcgcgccagcgtggtcggcttctcactgatactcctgcccgaccaggaaaagtggagcggtgacggggcgggtatcaaggccatcaccggcggcgacgcggtcgccatcgacccgaaataccgcgacgcttacgccgcccatatcccggcggtgattttggcggtcaacaacaacccgatgcagttcagcgaccgcagcggcggggtctcccggcgacgagtgattattaccttcccgaacgcgataccgctgatcgagcgcgacccgcagttgctggacaaaatcacccaagagctggcagtcatcgtgcgccacctgatgcagcgcttcgccaacccgaacgaggcccgcacactgctccaggcgcagcaaagctcggacgaggcgctgaccatcaaacgccaggccgacccgctggttgacttctgcggttacctgacggtgctcggcaccccggaaggcatgatgataggcaatgccaacatcaccccgccgaatccgcgtcgctacctgtatcacgcctacctgtcgtttatggcggcacggggctatcagcacgtgatgaacctgacggcctttggtctcgcggtgccgcagacgctgagagagtatgagaaaactctgctcaaacgtaaaacccggctggggatgcagaccaatgtggtattgagtgaagagtgcgaagcggactggctgccgaagtgtggggcggtgtgacgatgagcaggacgatcggccgggccgatcaattgccctttattgatctgccgaatccattggacgctcaatcatcgcaccgcctatagtgacagtgaaaaatacgcaacaacaccagggcattaccccggccgcagagcggccggtatcataacgacaagcgctcccaaaccggctcaggccggttttttatatcctcgtttcgcccccctattgacgctgtactgaatcgcagggctgcccgacagtcagtcggatgagggaacggcgggaggcttaacgaccgcgccccgacgctgcccctgcgtcggcatcaccaccccccaggggtaggccggctgctgttctttctcatactgataaacaatgagccgcgccagattgcgattgtcataacggcggccgaaattgagcgcaatgctgctgggggcggccaaaatcacgtggatgcgttcggcgccacacgccgtcagcattttgacctgttcgataaattgcagcgccagccgggtttgtttcgacagcgaccagtgattaccgagcgttgtggcgttcagcgagagatgtgacagcgggtaggtggggaaagtttggcgtatggcggcaatgtcggcctggtaggacaccgagatcgccagcaccacatctttggccgctgaggtgacgaggctttccatcaggctaaaatcggcgcggtcatcatcggcattgttgtcaatcagccgccaggcctcttgcgctcggtcccagtcatagacgcagaccgggccgttgtcatcgagaatggcgccaatgtagaaggtgaacggaaccggcaattgcccgccatacaccagtgtcagatcctgatgatcgataccgtcaatgcgggtggcgatattgctggccagcgtgctgatattgtcgtcaaaggcctcttccgggtgactgattgcgccatcccgcatccgctgcgtcatatcgagggttaatgcgtctatctttccgttgaaatgacgaggtaccgttttatacagcggcgtggtcgcgactttccgcagcgctctcccttcgataaccaccacctttttgcgcaccgtgattttagcctcctggtaagcgtcgaccagcagccagacaaatccccccagaatgatgaatgccgccacgaaattgatgaaatagtccgtgatgacattcccctcggagacggccagcgagaagcgggcatcgcctttctccagcgttaacgccttccccagcgagttgttcacactcaggatcccggcgccaagcagcatgatgaggtattggattttccgctggcgcgttttccagtcgaccagctttatcagaatatattttgccgtttccatgtcagcgtttttcccttatgtgtgctttgatcttcaaaaacatctcggcctgatacagcgcgtcatccagcgcgttgtggctgccgtgatttttgagattaaattgggcgtcgatacggctggagcgggtgtcttgccagcggctgccggtggcccccatgtacagggctttgatatcgagggcggcaaagccaaacgggttatggccgagataaacgtgaaagtagtaattgatgaatgaccagtcgaaagccgcattgaaaccgacgaaaatcggtttactcgtggcgtcggtgaccgcggtgaccgcggtgacccagtgagcaaatcgctgcatggccgctttcggatcgatgccgcgggttatttgggtctgcagattgaaaccggtgacggccagcgcttcaggatcgtaatgcagattcagcggctgcacttcaatgtaaaagcgttccgccgggttgtcgatgacgcaggcgccaatagagagcaggctgcacacgccgggtatgggcccggcagtttcaatatcgaccgagataaagccttcatgttcaacgctcatttttaacctcgctggtgcgtgggtgcttgccgccgccttcccagtcgcgggtgcgcagccactgttcaaaataaaacagccagagcgacgcccagggaatgatcgtgtcgctgatttttaactgggcgcgccattcgctgagcccattgtcggcctgtgagccaggcaaaaacaggcacagcctggcgccgggaatatgcttatcggcgggatacaggtgcggaatagcccgcgtaccggccaacgcgaagagatccggttctgtcaccacgcaaatcggtggggtgagcaggctatatcggatcgcgaccttgtagcggcggctgaacagcgagggttgcagccatccttcccatagcagggtgcgatcgtgatggataatgcgcagccgttcatacgggctgccggctttcaacgcgtgatattgctgggcgagggtcagcggtttgcagtgatgcttgataaccacgttattcaccgtagaaggtgtttttaggcacgccggcctgggccgccgtgctggcgaggccggtggcgatcagcccgccggttttcttatcaagttgcaggctgccttgttctctggccgactgcatatgctccatcagacgttgcctgacgacatcgaccggctttttgccgaagccgtcttcgaggctcaggaacaggttgtcttcccccacgctggcggcgatggtgttaaacgtcgcctgggccgcggcatgccactggtaaaaggtttcactgcgctgaggcccctcatcctgctctgagcggttccacttctcggcgaagttttcctccggcatgtgcgggttgctgacctgtatttctccctgtatcgacacaatgaaatccggcatcagttccagcacgtctaacagaatatccaggtcgttgtcgtaggagcgcctgtcagcaatgatgtggttgtaggcatgacaagccagcgtggtgatgatgaccgaaatcgggcggcagcgctgccggacatcatcctgctcggcggcccattcgtcacggtggcgtttgagaatttgtacgatgcgattaagcaatttcttgtcggtgctgtccggcagcgggagcagcgcctcggtgcccacgcggctggcggaatccatgaccagaatggtgcgcaggggctgcacgctggcgctgctatcgaaccactcggcgtagccgctggggttggactccttccaggcggtgtgcgcatctacgacccacagcggctggcccggatgttgtgcgccggtgtgttcgcggcccggcgtgatatccagatgataatctccggcatagttgatacggaatccacggggtaaatcgcttagtagatctttataagtgttatgcgactccagtcgccggcgaatggccgatattacgccggtataatccgcctgggtggcatggggcagataacaaatcaggtcaatatcgtattgctcttcatttttgggcttaacggtggtgttgagccgcacgctgccctgcgggtaaataacggcatcttgcaatagcggatcgtcgccttcagacaggaaggtgccgaccccgttataggcgcttttgatgttggcgtattgggttttggtgagatccagcgtttcaataatttgcgataataaatcggcgatacgctgcttttttcctgccggcaggcttctggcggtagcggaaccgtacatagtatttccttatgctatgggggccgctgtactgcgggtgtgagaacgccacagcggccaataataaaaaggggtgaagcgatgggccgcaagcgggcccacacaccgtatcactcatgaaactcgggtgacgtcaggggcattccggcaggctgagcaggttattggggtgttcgccgtcattttgcgttttgaggtatttattccccgccgcgctggttgagataatcacccagacggaatggccatttgcggtgacccaaaagcgccaggtgcccgcctcgatcccggcaatggcgtctgcctggggcagtgaccagcgggtgccatcggcgttgacgccgccaatagcctgaatgcgctcatgcgcgttttggcgatcggattttctgatacaggtaacttgatggtccgacataacaactcctcggttagggaaatatttacgcataggcgtaagggaaaacagaaataatgggcccggatagccctttacataacctgggttgaaatcactgctataaatgtatagtcggctaatggtggtgcattcaatagccagtctattacgggtgctgaagtttctaattatctgtggcgttaatgatgttttttgccctcattaaagtcaacatcaataggatggttttcttgattcgttatcacataatttttataatttgaaaaaataattattataattcatatttatttcaataatatattgacggtgtctctactctgaatgcgtttatgttagtaatttaatttaatttaatttaatttttattaatcgcaatgctgggttttatctgtcattgataggttgcgcatcagcctgataaccctattaaactcatgagggatatcagggcgactggggttagggctgttttttagcctgagcgggtgggtatacctccgctatgcgcaaggtgtaaatcatggtggcgttgggggggactttaggtggatagcctttatctccgtaagcctgctcggggggaaccaccagggtcatcgtaccgtggtttttcagcagcgagatggcttctttaaacaacggtgggaaatccgccaccggctgcgacagtgtggcaccagtcgcttccatatcttgcaccacggtgccgtcgaccagcgtttcttttaccaccacatccaccgaggcggtagcggggatctgcgcatcgcccgcatagtcgatacggtaccaaaatccggatgatgcctggtgaacacgctgatctttcttgaattcccttagataggccgcacctttttgccgttgggttgcgctgatttcttctcttgcggataccacttttttctcggcggcggccagggtgttattgagttcatcatccgacaacatccgcttgcccgcaaaggcatctgcaatgccggccaatagcattcccttctccgctctcactccccaacgctgccgttcttcctgcatttgcagaatttcctctcccagtgaaatgcctgcggcgtaatcctcacgcggttgtgcgcctttgagctcatcggccgtcaccagacggggacttcgcgcttgcaaagaagccatgttggctcgcgtatctgccagtttcttaacggtttcatccagttcggtttgcatcagttgacgctgtgaccgccattcagcttgctgttcccgcagcaccacgtcgcgcttttccgcttccatcagcaaattcttttggtggttggctgccgccgataaggcctggttttccgacttagcttttgacaactgctgttgtaatgccgctcgatcctgataccactgttgccgtatctgtaagaggttggctttcgcctggcgttctgtcggggtcatgctcagcgactgacgcaagctctgcgccaattgtgatagcgcagcccaatccggcgttgccgttacggcgttttgctgcagacgggagagctgtaattttagctgggctatttccgtgcgctgttgctggatctccttatccttaattcgccaggattcgcgttgaggtggcggttttttatcagtcttacctttctcgacgctttgggttgggcgtttttctgtgcgagagctatccagtacggcaggggctttttcagccgggtagcttttttcgctgtattgctcggcaaactgcagcaaagccagaatatcggcattacccttgcttggcgccgatgaagccgctggtagcatcagccctcccgccagacaggccaaaaaacggtaggtaaaccgtttccagacgatcattttatcgcaccaccgcgtttcgccagttcggtaagtaacgcctgattaatctcggcgcattgatagctcacctgataacgatagagggcatcaacggtctcttgcgtgcgctcgttgacctgggtacgcacaccggcgtattgcgaagcgccggacatcaggttgtcgaacacctgtttttttgccgggtaatccgccgttttcagtgtccccagtgcgcttaaattctgttggcactgctttaaatcctgggtttcacgcttgaccttttcatcctgcaatgtgctggccgaagcggattttgtctggggcattttggtggactggcaactgctgaccaacagtacacacatcaataccgccgtgatggataggggtgaatggctcatgttcaaattccttttctcggttggtggcaggttaaaccgccttgcagcatccaatggaacagctcgttacttcgtttaaaattcaattttctcatcgccgctcgtttgtgcgagctgatggtcttttccttgatacccaggaagctggctacgcaggcaggtgtttttccctgcttgagttgatgcaacacttcgcgttctcgttgtgtgagcgctaagtgttgcaagttctccgaagtagattgtgtttttaccgatgtcttttgcagggaaagcatgacgttttccattagctgcaagagtaagcttaccgattggtgtcgataaaggatgttagatttattaacgctacggtataagtgctgcaaatgggtatcttttctgtcagcgatggcgacatacactggtttatcgttgttcatacagattgcgctgccaggcgcaatcaaagtgccgcaacgtattgcctgaaaaacgatatctgtcgtttttccgtaggcgagatgggaggaaaactctacttgctggccttggttttttaagtaaatggtcaatgccatcgctaatccggcggtataaaatttgtcatcgtcaatgatgacgatgttcagtgtcttattcatgatggcattttgcgtgcttttcatgttttgggttgcctgtgctctgagtattcatagtgccttggtcatcaatgtttttttgcatgtcgacggtcagctagggaactaatcgccacctggctgatgtgggtagtaaaagcgtgtttttggattgataaaactgtgttgtttgtgtggaggacaggctagcgaattaacgatgtgatacacaacttaattgttttcattgttttttattatggttttattctgtttttttattttttttagcgttttgttctttcctttttctgttattaatcggttggtgaggtggttaagtcatggtgatattcagtacgattaggggggaggtttaaccgcttgccaggcacgcgattaaacctttgtgagagttactgttctgttatagcgcagacaaaaattgggttatctaatcgcttgtagataactgagttttccttcaggtgttttgtttctagatagaaggaaacgcctggaacttctggtaatacgtaatgttgccagagtgtatcgggcacgttgtctttaggattgcgcttttcactcgtgattacagctacactataaccgtttatatccgccggtttatgtgtgacgaaaattgttctgtatatcgtgtaattttcacttttgtctttaagggagcctatcaccagaacttcactgtgctctttatgaagggtaatgacatttatattcgcgttaaacttaatccagttgccattctttgttgcaatactcgaattcacttgagtatcgcagcggaacggtttccagctaagactgtttaggtaaaagaaaaacagccctatgccaatgacgctaaaaatagatacccagacgattactctattcatgtcactttactcaaccagtttatagttattgcaagtttgatagctcatattggtgcttttggtacaaaccgccataaagtgaacctttagtttgtcattggcagggcgtgccccaatatagtagatgtctcgatttatctgcgcacagtctatctttgcatcggagagcatttctcgcgcatgatcaaactgttcactgcttggcttattgttacccagggcataaaaattgcatttatcctgaacgcctatgagcattggctcttcattactgtgcagagtcatcaactttatcgctgcagcaatggcgagtaaggcgaagataagagccaggccgggtttcagcatacgctgcagcgttcctctgaggcccgaatgtgtgggatgaggcgttaggttttgctgctttaccggctcactcgtggtaaccgcgggggcaaccatttcaacagatccatcttctttcggtggtttagtttcggggtggatttctgcatccattttaaaccccaccctcggcaccgtaagcagaatgtctttgcttaccccaagcgcttcaaaggcttttcttaactcactgatatggttgctcaaggtggcgctggacggagagaatccgtaatcctcccagacgtgcttgatcagcgtttcgcgcgtcagttcatttctattgtttttaactagctcgattaacaatcggttgcctggtttggataaccctatagtgagttggtcattattcctaagcattaacagccggttgtcaggatcgaaagtgatgattaaatttattatgtatttcatgatgatgtattttttctttctggtgtttgatcttaagattaactaaaggcaagaataatcttgttttaagatttataaaatttattggatggggggctgcccgtcaacttgtttttagagtggcgttttttattgcggatgtcgttgaaagccaagtggtgttattgtttaattatgcggctcaattcaggttaataatctatatgtgttgtgttttttgttttaatttggttttttaatctaatttttttaaattaaatagattatttatcttttttgtttttttgtgattactatattcaccagttgccggtagccataacgtagcaagttgacaggtgtatgttcacctttctttctctgtatgtttggtgccgaaataatggcgacttaacggaaatgtgacagaccttaattaaggataaagtagaaatgaaattgaataaaatcatgatggctgcagttttggcattcggtactgtttctggtgtgcaggccgccgatcaaggacatggtaaagtcaccttcaccggttctattattgatgcaccttgctctatcactcaagagtctattgatcagaccgttgagctggggcaaatctctaaggctgctttactcagtggcgggaaatctaccccacgtaatttctcgattggcctggagaactgcacgttcggctcacctgccaccaaaaataaggtgcaggtaacctttacgggtatggaatctgcggctaaaaatggcctgctggggattaccggcacggctaaaggcgccagcgtagctatcactcaggctgatggtgaaatcatcaaactgggcgagccaacgaaagagcaagtattgcaggacggtaacaacacgctgagtttcgctgcctacatgcagggcgataccgcttcttccgcgtctattactgaaggtgaattccaggcagtggccgattttacactggcttataactaaaagctcactccacataaagtaagtgttttctctgtatgtgtgtatatgcatgcggtatctccgcatgcctttttgacaatattacaaagtatggagcgcgttttatgagggcgaataataccgttattatagtggtttcttgcctgttttcctttccagtgctctctgttttagccggcgagcacattgccggatgggggcgggtaaatatgcaagggtccattatcgacaccgcttgtgctattgcggttaacagccgagaacaaaccattgatatgggggttttacccttatcggatattattcgcgatgggcagggtcgcagcaaacctttttccattgatttagtcaactgcatcactgaacgccctggaaaggaaggctggaagaaatttcaggttacttttgatggtgaagctcatggcgggttatttggtgttaacggggatgcctccggcgtggcgctgcaaatcatcgatacccagggtaatgtcgcaatgccgggcaaggctatgccgccagtggatattattcccggcgacagccaattgaattacgccatgagattggtagccaataatcatgcgttaaaagcaggtgattatttatcatctatccgatttaagttggactatttttaatttcttgctggaagagtgctgtttttcgcctcgcgtaatggatttatttatactaataaggtaatggcatggagttttcttcgcttggaaaaattgcacctctgcattcgttaggattgtttatttcccttgcgttgggtacttcagtgataagcgcccatgctgccgataatattctgttcaataccgatgtgctggatgtcaacgatcggaaaaacatcgatctgagccaattctcgcgcagtggctacattatgccggggacctacggcatggtggtgcacgttaataagaatgacttgccggagcaacagattgcattttatgcgccggagggcgacccaaatggcagtcgtgcctgcctcagccctgagttggtcgagcaactgggattcaagcccggcgtgctgaaagacctgacctggtggcgagagggagaatgtctgaacgagaccagcgtacagggaatggaagtgcgtggcgatttgcccacatcctctctttacctgagcattcctcaggcttatctggagtacagcgacgagaactgggatccgccgtctcgctgggatgagggtattccagggttgctcttcgattacaacgtcaatgcgcgtagccagcatcagcagcgggacggatcgcgcagttatagcctcagcggcaacggtacggcgggcgccaacctgggcgcatggcgtctgcgtgccgattggcaggcgaatcttgaccatcaaacggggagcgggcaaccgacccataaacagctggactggagccggtattacgcctatcgggcaataccggcgctgcgctcgaagctgatgctgggtgaaaactacctggactcaggcatgttcgacagcttccgttttacgggggcgagcctggtgtcggacgacagcatgctgccccctaatctgcgcggttatgcgccggaagtggtgggagtagcgaaaaccaacgccaaagtcaccatcagtcaacaagggcgtgtgctgtccgagaccacggtggcggccggaccattccgcattcaggacatcaacgatgcgatcagcggcgagctgaacgtgcgggtggaagagcaggacggtggcgtgcaggagttcgtggtgaataccgcgaacatcccgtacctgacgcggccaggctcggtacgcttcaagctggcgacgggtaaaccgtcagactggcagcaccattcgcgcggcccgctgttcggcaccggcgagttttcctggggggtgagcaacggatggtcgctgtacggcggtgcgctggcgggcggcgactacaacgcgttgtcactgggtatcggccgtgacctgatggcgttgggggcgctgtcgtttgatgccacccagtcgcgggcgcggttgccacaggaagacggcacgctcagcggcggttcctatcggctcagttactcaaagaacttcgacgaatacgacagccaggtgacctttgccggctatcgcttctcggaacaggactttatgagcatgagcgagtatctggacgcgcgttattacggcacccgaacggggaatggcaaggagatgtacaccattaccttcaacaagcacttccgcgactggggactgagtacctatctcaattacagccacgagacgtattgggaccggccggccaacgaccgttacaacctgacgctgtcgcgttatttcgacgtgggccggttccgcaacctgagcctgtcgctgtcggcgtaccgtaatgaatacaacgggacgaaagacgatggggcctacctttcactgtcgatgccgtggggggataactcaacggtgagctacaacaccacggtgaaccgcgacgacaccacacatcaggtggggtattacgaccgaattgatgagcacaacaactaccagttgcgggccggcagttcgcgcagcggggtgaatgtgaacgggtattacaaccatgaaggtgataaggcgcgcatgagtgctaacgccagttatcaggaaaaccgttacagcgccttcgggatgtcgatgcagggcggcatgacgatgacggcgaacggtggggcgctgcatcgggccgggatgccgggcggcacccgcatgctgattgacacgcagggggtggcggacgtgccggtgcggggctatggcagcaccaccaacaccaatgcctggggcaaggcggtcatcggggacgtgaacagctattaccgcaacagggcgagtatcgatgtgaacaaactcggtgataacgccgaagccacgaagtcggtggtgcaggccacgctcaccgaaggcgctatcggttaccgccagttcgacgtgattgccggcgagaaggcgatggcggtcatcaaattggccgacggcagtgaacccccattcggcgccacggtaatgaacgcccgcaagcaggagacgggtatcgtcaatgacggcggcagtgtttacctgagcggcattaacgccggcgatgccatgacggttcactggaacggcggcgcgcagtgtgaggtgcgaatgccaacgccgctgccggcagacatgctgatgaatacgctgctgttgccttgtcatccgctgggggcgcgcacagagcctgacgcgcggacgcagggtgtgccagtgccagtggttgcgccagagccggaaccggcttcgtaaccgctgcgccgagggataacacggcgtgcagatttaacccaaatgctatgagggccgctacggccgggaatgaaaacatgcgaaagagcgaattgaacatgaaacaacatcacgaaggccgcccggttgcgtccgtgcggaaaaaggccctgacgacggcggcagtggccggtgccctactcgcggccttgctggcccagcaggctcaggcagcgatagcgctggatcgcacgcggattattttcgatggtagccaaaaatcggtgagcctgagcgtcagcaaccaaaacaagcagctgccttatctggcgcagggctggattgaagacgacaagggcaacaaaatccagagccccctcacggtactgccgccggttcagcgcatcgagccgggcaaaccgagccaggtgaaaatccaggcgctgcccgtggcgaagacgctgccgcaggatcgcgagacggtctattacttcaacctgcgggaaatcccgccgaagagcaccaagccgaatacgctgcaaatcgcgctacaaacgcgcatcaagctgttctaccgcccggccgccattgcgatggacaaaaatgcgccgccgccgcaggagcaactgaccctgagcaagcagggcgacaagtatgtggtcaacaatccgacggcgtattacgtcacgttggttgatgccgccaccaaaaaagatggcgcggggatcaaaagcttcgaaccgatgatggtgccgccaaagggcaatttgccgttgacggtgagtgcggctgaggcaggtaacagcccggtgctgacctacgttaacgactacggcggccggccgcagctgagcttcagttgctccggcagcacatgcacggtgataccggcgaagaaagcgtagcagagcacggtctggcggtgcaggtaccggtcaagcgaagggagacaagaatatgggcatgacacacgagacgggcagacaccgacggggcctgtgcggagcgattgagctgaagtattacggcgtgttgttcgggttggtgctgatggccccgataacgctgggggcagtgatgtggttattgccaccggcgcaggcggcggtggacaactgggatgtcgaaggcgccaacggcaccttgtacgttcatggggcgttaaccgagagcgcctgtcggctggagatgaccagcgcccatcaggatgtcgcactcggtgagacgggggcggggcgcctgagaacggttggtgcgcgcggcgaaccgatccgattcgagctgcgtttggaggattgcctgcgcagcccggccggtagccgcgatgtgcgtaccggcggcctgagctgggcggacaaccagccgtcggtcacggtgagtttccgtgcggcgcgtgacgccgataacccgcagttgatgaaggcgcagggcgtttccgggctggggctgcgacttgaaaatgcgcagggggaagacgttcgcctgggcagcagggggaaaccgctgttgctgacgccggggcagaatacgctgagctacacgataaccccggaacgcactcccgccgctctgatggcgggcagctatcgggccgtggtggattttcatctgagctatgactgaggcggccgcaatgaatgggatcgtaacgctgcagcgaacgctggcgggggtgctggcggccttgccgatgctggcttgtgcagccccctcggccacggtcaccgtcaaggttaccgtggtggcgccaccgccctgcgtgataaacgatgaccgaccggttgaagtggagttcggtgatgtgatgaccacccgggtggatggcgataactacaagatgccggtcaattacacgctgtcgtgcaccgggggcactacgaatgcgatgaagctgcaggtcaaaggcaatggcgccgcgttcgacgcgacggtgttgcagaccaacaagaccgggcttggcatcgaactgcgccagggcgacggcaaactggccgtcaacagctggctgaatttcacctatccgaacaagcccgaactgtgggccgtgccggtaaaacaggccggcacaaccctgacgggcggcgagttcagcgcaggggccacaatggccgtggattaccagtaacgggagcggagcatgagcaaaacactaaagatcctgttgctggccgggggggtgacggtgggcatgacgccggtacaggccaaagacggtgaagccgacatgacgtttcacggcaccctgatcgagccgccgccctgcaccctcaacgacggcaatcaggtggaggtcgatttcggcgatcgggtgggcatcaataaggtggacggcgagaattaccggcaggggttgaactaccaaatcacctgtgacagcgccgccggcgggaactgggcgttgacgctcagcctgagcggcagtgcggcagggttcgacagtgaagccctgttgacggacaaagccagcctcggcattcgggtgtaccagaacgataaacccttcaccccgaacagcacggtgaagataaatctggccaacccgcctcggttggaggcggtaccgatcaaacaagcgggcgccacgttgaccgaaggggcctttgaggcctgggccacgctgcgtgccgattatgaataaggagcgcgacatgaaaggggaatcgggctggcgccaaccctcgggggatccacgttctcgggtgggtgccctgctgttggtgccgatgttgatggccgcaccgctatcggcgctggccgcgggtgacaataacctgtacctgcatggcgctctggtcgcagagccctgtgtgataccgccgggcgatgaagaaatcacgctggattttggcaccattatcgacaagtacctgtacctgaacacgcgcactctcgggcaagccttcgagatacatctggaggagtgcgacctgacgctgggcaagacggtgagcgtgacctttaccggcacggaaaatcaagccttgccgggcctgttggccatcgatggcggcagtgcggcgacggggattgccatcggatttgagacgccgtcggcccaaccgctgccgctcaatacccagagtggcaaatccctgttgcaggacgggggcaacaccattgcgctgagggcgtatgtgcaaggtgagcccctggcgatagccgaccagacgattggccggggcgcgttcagcgcggtcgccactttcaatctggaatatgagtaagcgacagcaaatcggcagtgacaaacatacagaaagaagacagcgccgcgcaggactgggataaggcgtatcgctggttgtgcctgcggcgacagcatgcgccaccgaatgcggatgtgtgggatttacgctttaagtggccacggcaaaagtatcaatggctaaaccgggtactggcaggggaataccagctgtcgccaatgcaggtttttcgacggcggaataaacgttgggtgcaatggtcggcgcatgatgcgttggtgctcaagtgggtggcgatgcaggtcgaagatcaattgcccaggaacgcgcattgccatcacctgagagggcacggtggcgtgagcggttcgacgcaatctgttgcttctgcctggcaaagtggggaatggcgttatatttaccgcacggatatccggggttattaccggcatgttttaaagcatcaggtggccggacaattgcattggcatatacaggatgcggtttgccgcaacctgtgcctgcaatggctctattacagcgtggaagacggcggtgagatccgtacccctgaaaaaggaatttgtcgcggcagtgcgctgagcccgatgattggcggcagcctattaaggcatgttgactcttattttgcgacgcgcgaggaactgttttatgcccgatatatggatgactttattttctttaccaaaacgcgctggcatttacgtaaaacgattaaatcgctgtatgaatttttcgatttgggcggttttgaaacccacccggataaaacacaactggggagaatggaaaatggctttgactggctgggggtatggtatgcccccgaagggccccggatagccccgagagcaatagagaaccatcgggaacatattgcgcggctttatgagcaagcacgtttgaggaaactgtcgaaggcagagaccgataaccgtgtgcgggaatatgaagcccggtggatgacatgggcaaaacaccatttgagaaaagtggggtgattgcctgttgattaaataaattacacgataggtatcgtctcatgagttggtacaccttctcgctcttgattctagttcaatcgttgagcaccgcggcgaacgctgttgcgtggccctacgttaataatccccggattatctcatgcacctctggcagccaaggcgaatgttcgaacaacgttttctacgatagtgatggtgtcgtattcattgacatcatgcccgtgggtcaacccgatccgtcgctaggaactaagattcgtgcggtgggtattcattgctactacgggaacagccttatcggtaacccctttgggggctgccactgggtccggcccttgccaggcacatttgccaggcacattccgatcgtgacgggtaagtgcgagctgaaaaacacaagctcgtgggagttaacgcctgactccacttgcgccaccgggggatgggacggtcacaacggcgcggggccgggtggcgagtgcgtgatcttcacccaggtaaagacttctaccgtgggcaccctcaatacgccttttggggtgctgcaccctgataccgtcgcgaactctggcaatcggttctgtcagaaggccctaccaccggccgttcggtgtgacctcgatctcccaactagtctcgaccacaagacgatgccccagcagggctcgggttccgtcacagtggttggttctatctcctgtggtgccaagcccgtggtggagatcgtgggaggggatgtagttgtcctaggcgctggtgtgaaaagccgtttgtctacgaacgttacgtctgcgacaacggtggcgttgacgtcgaagctgacagtgaccaacgccgctccgggggaatatcggggcgcggcggtcgtacgggtatccccatactaatggtaggataaccccgtcgccccgccgtaggggcggagtcgagggtgaaagacggattacagcctagggctggatggcgatccctcgttgaatgtctgtagtggagggatgtcgttgcggggaggccggcccctggatggggggtgtcccatggggaacgtgggtggtggcggcactccgtctcgttggctcctgcgagataaccgacgtcgtgctcgttgagggtaatacccgttcaaagtggtcatcgtacctactagactggacgggtagatcatattttccgccctagtcgaggaatcgtgccctgggcctaccatcacaaccgtaccagtggtgtaacgggcgcgggggggggggataatttatacgcgaagaatgtggctatgcgtaggtcacagttgcacgagcgacgtaacccacggtgggtacaaaaatagtgggtggcatgggcttttgttcaaatagtccgaaagtggttgattttattccctgtggcttgtttgctcgtattcgcaatggggtttatccatcgccgtgcatgttggaccgctatcgccgagggcgaccccgtggggcctagtaggccccgcctcataccgtggggctatatttgatttcatgcttatacacgaatatgtccgactgacgacctcccgaggaatgcctgtgcggactgcatcagccagtccaagaacggcgaagttctgggcattctgatgcactgcgatctcctcgtgaacaaatcccaaagctccctaaaagtgaacggtgatgcatagtctgaactaactattctctgtgtaatcacatgatttaaaataataaaatctagttatgactactgtgacgtgtttttcgataaatctttttatgtcagtgctgatttgtagaggttgagtaaaaattatatgtagtggtatttgtgtatatcatggtgtataaaataaaattttccaattaaaaacatattatatatcaattggatagtgtttctttgtcactcctgtgatcttccgccaaattactgtttccctcactttcttaaattcaacaaaatcctatccaagcgagtcaggttgcagacattttttggaaaataactgttgttcgagtaatgagctttgatgtggttctctggcatactgagcgaattacagcgttgtcagtcagattaaagcggaggagacatggcaaacaagcacttaacccaatcaccggtaggtgagtttgttatgtttgccagcgatgatggcgaagtgcgcgttgaatgtcgatttgagcaagaaacgcgagcgaccatcgcgtttctttatcaagtgactccccaggcgattacgcaacatatcaaagcgatctgcgaagaagctgaacttgaacaaaacgcaacctgtaagtcttacttacaggttcaatagaaggggaaacgccagataagtcgcaatatttaagctaagcggttatgtgatatagtaatatgctctttcttgttgtttgatgatgtagttccttacttttctcttaagggaaagagtaagaaaaatactgattattaaccagaaaagaatgatttctatgatggtcaatattgggtatataattatcttgtctttttttacttcatctatgtatttatttagttcaacttggtttttctcatcattaaatatttcgcaaatcaatgatgacaactctggagagatgttttttattctttttagttgattgttatttccaaggcattgttttttgtcaatagaccaagggtgacgggaaaacaaagatgattccttggcggaatggttggtgataaagaagctttcatttgttgtttttaacgttaaaagagtccacccattttgaatgcgtaatgtttgtatgtgcatgtgaaacacaaataaaagcccaatggtcactgaaaaaataataaagccagacagtattttatcaatgagtgtgttctggggtgttttttttagaggaatagatatggagaacaatctaattgtccagttggggatacctgctttactcaagtattcagattcgccgtttaatggtttgtttaaatatttaagtgttatcattcctgttgcgaatatacttcctaatactccaaggatgcttgaaaatatttcaatggttgacttgaaactttcgtcagtaaataattcagtgatagatagtgcgttactcatgttgtttcctcattgtgactgttacgctttgttgattttttattattcttataattttttcaagttgttaacagctatctagtctatgataagtacatggtgttattgacatgaaactcattgagttgggaaatgattagtggttaatatacgaaatgtcttcctatatttagctaagcggctattttagtaacagcataatatatctgaaatacgatttgctataagcccccacacctaaccccctcactccctctgcaaaaagaactgcttgatggtctgccgcagccagcgatgcgccggatcgcgatccaggcgcgggtgccaggcctggacgataaacaccgattccagctcgagcggcagctcgatctccgccaacggcaggtggatgttgctcaccccctgcagtacgtggcgcggcagcggcaggataaagtccgatttcatggtcagcatcatcgccgaatggaagcccggcagggtcagggcgacgttgcgctgcaggccgagatcgcgcagcgcgtcgtcgatcggcccctgcgagcgcccacggcgggagacgctgatatgcgggtaatgagtcagggtttcgggcgttacccggccgatgattgggtgcccagggcgcaccagcgcctgaaaggtgctggtgaacaggctctgcgtcttgatttccgggtgccagtcgcgcgaggaaccgatcaccagatccaccttgccgctgcgcagcgcgtcatcctcgccgtcgctttcagcgataaacttcaggccgcttaacggcgccatgtcccgcagcgtctccagcaagccgcccgccagcgcgccgataaaaatgtcgttggcgcgaatggtgaaggttcgggtcagcttgccgggttcgaaggattcattcggcgcgatcagcgcggtggcctgttcgatgatctcgccgagctggcgtttcaattccagcgcgcgcggcgtcggcaccagatgcttaccggctctgaccatgatcgggtcgtcgaactgccggcggatgcgccccagaatgcggctcattgccggcgcgctcaggttcatcttttcggcggcgccgctcacgctcccttcttccagcagcagattcagcgcatagatcaggttgaaatcaattttttgcggcatggcctctccggtggtggtgcgctcaatggattgcgttttgtgcaattagttaattacatcatttcattttaaacaatcgaaataagtccggatactgcccacgacaacaaagattgaggctgaaacagcaggagtggggaatggttgaggtgtctgttacgccgcaccacaaaaatcggtggctcgccagcgccggcgaaatcaacggccgcacctggctggggttgttcggcgtgtttttggcggtgatggccagcggcgtgggggaaaacgccagcaagttcgcgctggcggatatacagggcggcatgctgctgaatttcgatgccggcagttggctgaccacctgttacgttaccggctttgtgatcggttccgggttcacaccctgtttttggccgaccttttcgttgcgccgggtggcgttgacgatgtgcggcatttacctggccggcgggctgctgacgccctggttgggagaacagtatggcgtgttgctggcggtgcgcagcctgcagggcttcgccggcggcgcgttgccgccgatgctgatgacggtggtgctgcgttttatgccgccgctgatcaaggtgttggggctgggcgcctacggctgggtctcggcctggagcgctacgctgggcgccaccgccgccgctttcgcctttcactggggttggagtgggtacttctactggaacctgccgctgatggcgattgccgctgtgtgtatcggctacggtctgccgcaggatcctctgcggctggagcgcctgcggcagttcaactggcgcggcctgctgctcggcggcatggcgctcggcatgctgacggtgggcatttcacagggggagcggctcgactggctgaactcgccgctgatctacgttttattattgggcggcggcggattattggcgttatttctgattaacgaatggtatcacccgctgcctttttttaatttgcagctattaagcaaaaggaatttgtctttctccttaattacgctgggtggcgtgctgttaattatggtgtcgctggtcaatattacgtcgggatatttatccgcgattcagggctatcgtcaggaacaaacttccgacttaatgctgtgggtggcgttgccgcaattaattacgctgccgattgtcgccattatttgcaatacgccgcgggtggattgccgctgggtactggcgatcagcctgctgttgatggccaccgcctgcgtgctggccgcccagctgacgccggaatggaacggcgagacgtttcgcgttatcgcgctgttgcaggcggtcgcgcaaccgatggcgatcatccccctgctgatgcaggcgaccggtgggctgttaccgaccgacgggccgtttgcggcggcctggtttaacgcggtgaagggcttcgccgccaccgcggccggcggcgccatcgcgctgctcagccgacagcgcggggactatcacgccggcacgatcgccgacggttttggctcggcctacagcagcgcatcggggtcggcggagcagctggcgcagcttgccgcccggcagggccacgtgctggccagcgccgatctttatctgttggttgccggcctggcgttattactgaccgcgctgattttagttatgccgacccgtatttatccgccgcgttcggtcgccgcctgacattttatcatcagaaataaatattaagtggagtcacttttatggctaacaaaaaagtcgccgtcgccgtattggcggttaccgtcattacgctggggttattaatgaataagttttttattaaagagacacagcagaataccaacgacgcctatattcgcgccgatatctcgcgtatttctccgcagattgccggtgaaattgcgcaggtgttggtcagggacaaccagtgggttaaacagggggagttgctggcggtgatcgatccgcgtgaattcaacgttgcccttgcgcaggcgacggcgcaggagcaatccgcccgcgcccggcaggacgacgccagggccaacctcaaccggcagagcgcgctgatcgccgccgcgctggcggagcggcaggcggcgcaggcggagctggcgtttgcgcgtcaggagcagaaccgctaccagagaatggccagcagcggcgcggggtcgcagcaggcggcgcagcaggcgacaacgcgggtgcacacgctttccgccaatgtggcgcaggcggaggcgacgctcaaagcggcgcgaaacatggagcaggtgctgcaggccaagctggcggacagcgatgccgagctgatgctggcgcaggccaagaaagcgatggccgaactgaacctgtcttacacccgcatcaccgcgccgatcggcggcgtgatcggcaagaaaagtctgcgggtcggggagttcgtcaaaccgggtgatgcgctgctggccatcgtgccgcaggacaagctgtacatcatcgccaactaccaggaaacccagttggaaaacattgcgcacgggcagtcggtagacatccatatcgatacctttcccggccaaacgctgaaaggacaggtggacagcatcgcgccggcttccggcgtcagcttcgcggccgtggcgccggagaacgccaccggcaacttcaccaagatcgtgcagcgcatcccggtgaaaattgtatttgatatcaacaaagagcatgccgccttgttgagcgccctgcgcgttggcatgtctgcggacgtcagcatcaatacgctggacagaggcctgcaatgaacagagccgtgatcccgctgctgttgatggcgctgagcggctgccgggcggtagggccggactacgctcggccgcagaacgcgctgcccgagagctggggtgagcaggccggcggcggggcgttgccggtggcctggtggtcgatattcaacgatgcgccgctgtcgcagctggtgcagcgcgtggcggccggcaacctggatctgcagctcgccacggcgcgcctgcaacagagccgcgccctgctgggggtgacggaggcggcgctgatgccggatctgagcctggacggcgcctatcagcgccagcgagctacctcggtgggcagcatggatccgtccggcaacggcggagaggcggattacaacctctggcgcggcggcttcagcgccgcctgggagctggacatgtggggcaagctgcgccgcgcgtcggaaagcgcgcgcgccggctttgccgcttcgcaggagaatcgacgcgcgctgttgacgtcggtgacggcggaggtggcgagcaactatctgcgcctgcgcgccacgcagcagcagctggcggtggcgcaggaaaaccgcgccacggcgctgcgcacgctgcagttgacgcaaagccgctatcaaagcggcgcgggcaacgaactggatatcgatcaggcgcaggtgcaattggcgcaggtggatgctctgctgccgacgttggccgaccggcaagaacggctgattaacgccatcggcctgttgctgggtgagcggccgggcgcgctgaacgcgatgctgtcgccgccggggccgctgccgacgctggcgcgcgcggtgccgatgggggtgccgtcggatctggcgctgcgcaggccggatattcgcgaagcggcggagcgtttgcatcaggcgaccgccgagatcggcgtcgccaccgccgactactacccgcgcatcacgctgaccggcaacgcgggctaccaggcattggccttgtcggatatgggcagctggtccacgcataccttcgccatcggccccgttttgtatctgccgttgttcgacgggggaaaaatcacccagcgggtacgcctgagcgaatatcgccagcaggaaatggccatcgcctaccagcaaacggtgctgcgcgcctggcacgagatcgacgacgcgctttccggctatcgcgcccaacagcgccgccagatgcacctggccgaagcgctggccgccaaccgacacgcgtttgcgctggcgcgcgacagctatctgaacggcgccagcgattttatccacgtcctgagcacgcagcgcgcgctgctggatctgcagtccgcgcaaattgtttcagaggaggagacggcgatcgccgtggtgaatatctatcgagcgctgggcggcggctgggaactcacctacccgtctgcggcgccacaggagaaggctgatgcacaacacgctgaataagattgtcgacgagatgctggaaagggacacccgccgcaaacgggaggcccgggtgagcgccgtgcggcaagtcaccgctcggatcaggcgcatcacgttgagcggcgacgatgtggataagtttatcgccgatccgcgcgcgcaggagccggccagctgggtcaaggtgttcttcccgtggcgcgacacgctggccgggcgggcctacaccctgagcggcatcgacaaactcgcccgcaccttcgatatcgacatggtgctgcacggcgaaggcccggcgtcgaactgggcgcgcgacgcgatgccgggcgacaagctggggttcgccggcccttgctccggcggctttcggctgttgccgcaaactcgctggctgctgttgctgggtgatgagaccgcgctgcccgccatgcgcaccattatcgcctcgctctccgccccgttgccggtgctgtggttcgccgaggtgggcgatgcgcaggagatccaggacgtcgattgctcctttttgcaggtgaacagctggcaaatccgcacccgacatttcgacagcgtgatgaacagtccgctggtgcaggccgtcagccattgcgagctgccggccggcgaagggcaggtgtggttggcctgcgagcaccaggtcgccgcctatctgaaggcgcgttttattaacgaaatgggcatttcccgcgccgccttgtttgccaaaggttattggaaaaagggcgaagccaatttcaagggcgcgatttaactcgggcgagtgaggatggttatgattgagagagtgttattggcggtggactgctttgaacacagcggcaacgccctggaatttatggcgcgcctgcaaggcagcatcggcggcgtgattgtgctgacggtggtggacaatgccttcacgctcagccgcagcggcctgcgtttcgacagcgatgagcgcgaggagtatcccgccgcccaacgggaagaagcgctggcggaaaagcaggtcgggcaggtgacgcgggcgctgaaacagcagggcttcaatgcccagggcttgctggccgcgggctcgcccatcgaggtgatcccggaacagatggcgctgttcaactgcgatctgttgatcatctcgcaccgccacctgtcttcgttggggcgctggctgaacgcttccgtcacgcgtggcctgctggatgagatcggtcaaccggtattggtgatcccgcgctaagctatgggtaagggcagccgcatgcggctgcgcgcgttcggcgacgaaggccgcacataccggaggtcaacatgcgaagtctggaagatcaccttgccgcttatgccgcctatcaccgcgatgcgcgcaatatcgccacgcattttatcggtatccccctgatcgtcatcagcctgctggcgctgctctcccggccggcgtggggcgcgggagggctgccgttttcgccggcctgcgcggcggttatcgtctcggcgctctattacctgcggctgaacctgcgccttggcatcatgatgctggcgttgctgctgctgtgcctcgggttcggcgcctgggtggcgtcgctgtcgacggcggcgtggttgagcgtcggcatcggcggcttcgtcgtcggctggctgtttcagtttgtcgggcacttttgggaggggcgaaaaccggcgtttatggacgacgtgacgggccttatcatcggcccgctgttcgtgctggcggaagcctgcttcctggccggcgggctgcgcgaactgcagcggaacatcgaactgcgcgcgggcaaagtgcgcaatgggaggggatgaggtggcgttgattcccacggtgacggcatttccgctgcagcaggcttttatcccgctgctggaggcgctgacggcggggctgccgcgccaattcccggcgctcatccacagcatttacctctacggcagcgtcgcgcgcggcgaagcccttcccggcgtgtccgatctggacatcacgctgttgctcatcaagccggccgatagcggggcgttgcagcgccttgaagcgtggcggcaagcctttcagctggagcagcggatcgtgagcaaggtcgactttgacatcggcagcgttgatgaagcgttggcgccggagcatcacgattcctggggattttggctgaagcatcactgccgatgcctgtggggcgaagacgtgtccgccgctttttcgctgtttcgtcccgatcggcgcatcgcgctggcggtcaatgctgatttacggcccgcgttggcgcgttatcgggagcaactgctgcaggcaaggacggtatcggatgagaggtgcttaaagcgcgaagcggccagaaagctgatccgcgccaccaatatgttgcgcgccgaggggagcccgttctggccgataacgctaaccgactatgccgatcagctgttggcgctttatgcagagcagcgcgatgaaatggactattggttagcgcacgcggcaggggaggcgaatgacgcggattttagcgacagaatgatgcaatttcttgactggatcgaagcacagaaaaaaataacgccggcttgagccggcgttgtcggcgagcgttacccgatcgccgggtaatcggtgtagccttcacggctgccgccgaaaaatttctctttaatgggcgcattcagcgccagcccgtgttgcaggcggtgaggcagatccgggttggcgatgaacgggcggccgaagccgatcagatccgcccagcctttggccagcgcttcttcagcgcgttcacgcgtgtatttgcccgagtaaatcagcgtgccgcggaaaatcaggcgcagtgattctttgaacgccgccggcatcaccggggcgtcatcccagtccgcttcggcgatgtgaatgtaagcggcgccgatatcgttcagcacgctggccgccgccagataggtggcttccggggtatcgtcctgcgagcccatcagggtggtcagcggcgccaggcgcacgcccagtttctctttgccgatggcgtccgctaccgcctgcgccacttcccgcaggaaacgcaggcgattttgcagtgaaccgccgtattcgtcgtcgcgctggttttcccgcgagtcgataaactgattgatcagatagccattcgcgccgtgcagctctacgccgtcgaaaccggcggcgatggcgttgcgggccgcctgagcgtagtcattgacgatcgccggaatttcttcccgcgttaaggcgcgcggtgcggagtgttgcaccatttcacccacgccatgttccggcccgcggccttcgacatccacaaataccttgaccccatcggcctggatagcggaggaggagaccggcgcggcgtggccaggctgtagaatggtatgcgacacgcggccgacgtgccaaagctgcgcgaagatcttgccgccggcctgatgtacggcgtcggtgacttttttccaaccggcgatgtgttccggggtgtaaatgccgggcgtccaggcataaccctggccttgctggctaatctgcgtgccttcgctgacgatcagcccggcgctggcgcgctgggcataatattcagccatcatgtcggtggcgacgtcgccggcgccggcccgagagcgggtcatgggcggcatgacgatgcgattgttcagcgataaaccgtttaaagaatacgagtcaaaaagcatggcgcttccctctgtgtgaatggggccgtagggcattgatgttttactgaggccattatatttcgtcgtttaattctaaaaacgcgcacaataacaaaacacttttgctctgtgttcaatagttgcggtggccgccggcttgccgccggtggcgggaatgaacccgatgtgcgctcgggcgacggcggctattgcctgtcggcgcgtggttgggatagagtcggctgctgtttttccccacgatttttaacaaaatcgcaaaagtcttttagcctcccgcctgcttatctttggtgtgatcaatgtcatacttttggcatcttaactttcccgcgcttcggcagcggttaaccggagttgttgaatgaaaattaactttcccttattagccctggcggtgggggcgttcggcatcggcacgaccgagttttccccgatggggttgctgccgaccatcgccaaaggggtggacgtctccatcccgatggccggcatgttgatcagcgcctacgccgtcggcgtgatggtcggcgcaccgctgatgacgttgctgctttctcaccgggcacgcagaagcgcgctgatcttcctgatggcgatctttactctgggtaacgtgctgtcggccgttgcgcctgactacaccaccctgatgctgtcgcgcatcatcaccagcctgaaccacggcgcgttctttggcctcggatcggtggtggccgccagcgtggtgccgaaggagaaacaggccagcgcagtggcgaccatgtttatgggcctgaccatcgccaatatcggcggggtgcccgccgcgacctggctgggtgaaaccatcggctggcgcatgtcgttcctggcgacggccgggctgggcgtgatcgccatgctggggctgtggttctcgttgccgcaaggcagcgccggcgcgcgtccggatgtgaaacgcgagttgtcggtattggtgcgccctcaggtgctgtccgccttgctgacgaccgtgctgggcgcgggcgcgatgttcacgctctatacctatatctcgccggtgttgcagcacatcaccgatgcgacaccgctgttcgtgacgtctatgctggtgttgatcggcgtcggtttctccatcggcaactacctcggcggcaagttcgccgaccgctccgaaagcgcgacgctgaaaggcttcctgttgctgctggtggtcattatgctggtgatcccgttcctggcgcgcagtgaaatcggcgccgcagtcagcatggtgatttggggcgcggcgacctttgccgtggtgccgccgctgcagatgcgcgtgatgcgtgtcgccagtgaagcgccggggctgtcgtcttcggtcaatatcggtgcctttaacctgggcaatgcgctgggcgccgccgccggtggcgcggtagtctccgccgggctgggatacagcttcgtgccggtgatgggggcgattattgccggattggcgctgctgctggtgctgttcacccaccgtcaggccgaaaaagtggcctacgccaacggttaaaacgacagcgtgcggcggggttccacgccgcgctcactcaaagccgagcaggctgaacgcatcgtcctgcggggcgtagccgagcaggcgacgggtctcttccagcgataaacgcgtgtagcggttattggaaaccccgtgcaccaccgcatattgcaccccgtcgacacgaatgcagcgctccagcagatcggcggcatcgcgatggctgagaaatgcgctcatgtcgcgggcgctgagccgatcgcccgggctgagggtggtgaagttggcgatgcgcaccgacagggcggaaagcccttcctgatgggcgaagtaggcggcgatgccttcgccgaacgccttgctggcgccgtacaggtttttcggtttcggcgcgtcatccgggcggatttggtaatcgagcggatagccttccaccgcctgtgcgctgctggcgaacaccacccggcggcagccggcgtctttcgccgcgcggaaaatattgaaagtgccgagaatgttgttgtccatcaacgaaccgcaaaagtcggcatcgggggagggatcggcggccagatgcaacacggtgtcgatattggcgcaggccgcgcggcaggcgtcgagatcggcgatgttgaagctgatgacttcgtcgccgggctgcagatcgtgcagcaggctgacatccctttccgccagccgcagcgcgtagcgatcgcccatcgcctggcgaaacgccgtggctacccggccgccggcgccggtgatcagaatccgtcccaactcagtccgcaacgtcatggtcgctgtcatccttacaatcgattacgcgttgaccagtaataatcgcccgcgtgacttttgtccagtcgttttaattagtcattctgatgtttctttcaccattatcaattgcacatggtgatttttgcgcaggtgaatatcgtggaatgttaacgatgcgcaatcaagtttggcgatctatttgccttatggattgccgatttcgaccaaaaaagcggggattgacagtggatggacgagcgctttgctttcgcctgaccgtgaattattaggttagttaatcttatgtttttgcctgaggcgggcgatattccgccccctctctattccgcctgcgcgatatatcactgctgtgctgaagccgatagagggcgacaggccttatttgatacctcaggtcggttttgcccgcccgatcacagttcggcaatttgccgacgcaaaggcttgccccggcaaaatccgcggtgttaacgtcataactcaaccgatttagggttgttactgctacggcaggcaaaacctaaacctcgcgtttctgttccccgatggggcagaggccgcgaggtttaggtttttttttgcgccgaattttgcctcagcgccaggccagcgtggggcggggagcggcagaacgcgaagtctaaggataactgtatgaaatatgacacattagccagtgagattttggccggcgtcggtggccgcgacaatgtgaaaagcctggtgcattgcgctacccgcctgcgtttcaagctgcgcgacgacaatcgcgccaacgcggcagcactgaagaaaaaccccggcgtcatcatggtggtggagagcggcggccagttccaggtggtggtgggcaaccatgtggcggaagtgttcgacgcggttaaccgcgttggcggattggccgaaggcgcgccgagcgacgacgcgggcggcaaaaaagacaacttgctcagccgctttatcgatctggtgtccggcatttttaccccgctgcttggggtgatggccgcttcggggatcctgaaaggcttcctggcgctgagcctggcctgtggctggctgctggagagcggcggcaccttcaaaatgcagttcgccgccagcgacgcgctgttctacttcttcccgatcatgctcggctacaccgccgggaaaaaattcggcggcaaccccttcgtcaccatggcgatcggcggcgcgttgacgcatccgctgatgatggcggccttcgaagcggcgcagcagccgggcgcggtgcgcgagtatttcttcggcattccgctgaccttcatcaactacagctcgtcggtgatcccgatcatctttgcggcctgggtgtcctgccgcctggagccgctgtttaaccgggtgatccacagtgcgctgcgcaatttcatcacgccgctgctgtgcctggcgatcaccgtgccgttgaccttcctgctgatcggcccggcggcaacctggctcagccacctgctggccaacggctatcagagcatttacgcctttaacccgatcatcgccggcgcctttatgggggcgatgtggcaggtgtgcgtgatcttcggcctgcattggggattggtgccgttgatgatcaacaacctgagcgtgctggggcgcgacaccatggtgccgctgctgttgccggcggtgatggggcaggtcggcgccacgctgggcgtgatgctgcgcactcgcgacgccaaactgcgggcgctgtccgcttcggccatcggcgccgggattttcggcatcaccgagccggcggtgtatggcgtcacgctgccgaacaaacgcccattcatcttcggctgcatcggcggcgcgctgggcggcgcggtgatcggctacttccatacttcggtttactcgttcggcctggtgagcgtgttcaccttcgcgcagatcatccccggcggcggcatcgacgccacggtatggggcgcgatcggcggcaccctgctgtcgttcgtgttcgccgcgctggccagctatctgttcggcgtcgcgccggcggaagaggccgccgcacagcctgaagccgccgcgcctctcaaccgcaaacaggcgattctcagcccgatcgccggcgacatcgtgccgctggatcaggtgaacgacgcgactttcgccagtggcctgctggggaaaggcgtggcgatcgcgccgcagcaggggcgcgtggtggcgccggtgagcggcagcgtggcgtcgctgttcaaaacgaaacacgccatcggcatcgaatcggacgacggcgcggagattcttattcacgtcggcatcgataccgtgaagctggacggggcgcatttcaccgcccacgtgcgggaaggcgagcgggtcgccccgggcgatctgctgatcgagttcgaccaggcggcgatccatgccgccggctatgacaccaccacgccgatcatcatcagcaacagcgatgattacgtggacgtgttgaccagcggcctgtctccggtgcaggaacaggcgccgctgctgactttattacgctaattgaggagcaagcgatgaacggcaagtttccgcaacattttctgtggggcggcgcggtagcggcgaaccaggttgaaggcgcgtatcaggccgacggcaaggggctgtcgacttccgatctgcagccgcagggcatcttcggcgccatcacgccgcgcgcggcgggcgacagcggcatcaaggacgtggcgatcgatttctatcatcgctatccggaagacatcgcgctgttcgccgagatgggcttcaaatgcctgcgcacctcgatcgcctggacgcgcattttcccgcagggcgatgaagagaccccgaacgaagccgggctggcgttttacgatcggctgttcgatgagatggcgaaatacagcattcagccgctgatcacgctgtcgcactatgagatgccttacggcctggtgaaacgctacggcggctggggcgatcggcgcaccatcgacttcttcgagcgctacgcgcgcacggtgttcgaacgttacaagcacaaggtcaaacactggctgaccttcaacgagatcaacatgtcgctgcacgcgcctttcaccggcgtcggtctgccgccggagagcgacaagagcgccatctatcaggcgatccaccatcagctggtggccagcgccaaagcggtgaaggcctgtcacgagatcgtgccggagggcaaaatcggcaacatgctgttgggcggcattctgtatccgctgagctgcaagccggaagatctgctggaaacccagcggcaaaaccgcgactggctgttcttcggcgacgtgcaggcacgcggctattacccggcctatatgcagcgcttcttccgtgaaaacggcattcaggtggcgatcaccgaggaagatcggcgaacgctgcgtgaaaccatcgatttcatctcgttcagctactacatgagcggctgcgtcaccgccgacccggagcagtatgagacggcgcgcggcaacattctcgatatggtgccgaacccgcatctggccagctcggagtggggatggcaaatcgacccgatcgggctgcgctacctgctcaacgtgctgtacgaccgctatcagaaaccgctgttcatcgtcgaaaatgggctgggcgccaaagaccgcgtcgaggccgacggcagcatcaacgacgactaccgcatcaactacctcaatgatcatctggtgcaggtggcggaagcgatcgacgacggcgtcgaggtgatgggctacaccagctggggaccgatcgatctggtcagcgcttcgaaggccgaaatgtcgaagcgctacggcttcattcacgtcgacagggacgatgccggcaacggtagcctcgagcgccgccgtaagaagagtttctactggtaccgcgatgtgatccacagcaacggcgccagcctgaaagaccgacgctaacccttcagcccggcggcaagcgccgggcgttaacctaacgttattcgctgctgttcatgatgggaaattctctcccagggaatgctgttgcccgcagtcagccgttatgcggagaaatataataatgatgaaaagcttattacctcgttccatgaccctggcggcgctggcgctgctttgtagccaggcgcaggcggaaacgctgcaaaccggcaaggacgtcgaagcccccaccgccaaatgggaaggagtggcgctcggctttgagccgccgcagcccgggctgttgggggatatgctggggatcaggccgatcctggaggatcacggcttccactataatctcggctacctcagccagctgtcgtataacgccggtggcggttacaaccacgataaacaggcgtcgtatatcgaccagttttcgctgaccttcagccaggatttgcaggcgctgaccggcattccggacgcggcgatcgaaggcaatatcgtcaaccgcaaccatgacaacaacctgacccgcgatcgcctgcaggatccgcgcgtcggcctgaccgatctgtcgcaggagagctttggcgggcagtcgattacccggctgggttggttgacctttagccgctccttcctcgatcgccggctgcagtggcgcatcggcatgatgaacaaggtgcaggatttcgatcagatcatcccctgcgattttcagacgctgacgctgtgcggcggcaagtccgccaactcgttgacctggtacaactggaacgtgcattactggggcacgacgctgcaatacaaactgaccgatggcctgacgctcaagggcggcgtgatggaacagaacccgagcgcccccagccgcagccacgcctggagctggtccaccaagggcagcaaaggcttcctgctgccgatggaactggagctgaaaacccacgccgtcaaccagctgccgggggtgtataacctgggcgtgctgttcaccaacgcgcgccagagcgatctttatgaaggggtgtccggcgggccgggcgccagcgatccgcagggctatcgcagccacgatcgcacctggttcctgtataccggtttcaaccagcaggtgacgcgccatgcggacgacgtcaaccgcggtctgagcgtgttctacagcctggggctgggagatcagcgcagcaactacctgcactggtccacctcgaccggcatccgctatcgcgggctgttcgatgcgcggccggacgactggctggggctcggcgtctcggtggtgaagctgagcgaccgctacaaagacaatcagcgttatctcaaccagatgagcggcatcagcgattatcacgatccgaactatcggccggtgccgggccactcggtgacggcggagctctattatcgcgttaacgtcacgccgtggctgcagctgcagccgggcctgcaatactggcatcacccggcgggcgtcagcgagacgcaggacgcctgggtgacggcgttgaaaacggtggtgaccttctgatcaggccgcgtcgctctcgcggtagcgccggcgggcgtgctcaaaccagctggccggcacgttgtgcggcggctgctgtaatctgagcagcccctgttcgacgatatggctggcctggcgccacagcgtcgggtcgccttcggtcagcacttccagcaggcgttgtttctcaatcagataggtttgggcgaagtggctgtcgtagtccagcagcgagcgggtgttgtcgatcagatccgccagcttgatggttttggcctgcggcgacgcgccggcgctgtggcgccgatcgcggtttttacgctcgaagcggttgccgtcctcggcgcggctgacgttggtcaacatccgcaccagttccgccacttttggcccaaagtggctttcgatatcgccgagggtggtgggcgtatcttccaccgtgtcatgcagccaggcggccgccagcatctcttcggtgtgcggcacgctgcgcaccagctccatcaccgcctgtgggtggacgatgtacggatcgtcggtgtatttgcggcgctgatcgatggccgcatgcgccttggtggcgtagcggcgcgcgcgttctgcaagcgtattcgtcatttcctttccctccgagcatcctctgcatgaaaaaaaggtagcatatctcacaagaaatagcttgcgattacatcgtgcactatctatattcacaaacatgaaaagcaccgataccgcacaacccaacgcgaagaacctgctgcagctcgatcagcagctctgtttcgcgctgtactccgccaacctggcgctgcacaaagtctaccgcaagctgttgaatcagctcgaactcacctacccgcaatacctggtgatgatggtgctgtgggagcgcgatcgggtgacggtatcggatatcggcgagcggctgttcctcgattccgccacgctgacgccgctgctgaagcggctggaaaccgccggtttgctggtgcgctatcgcgccaccaccgacgagcggcaggtgatcattgccctcaccgaagccggccgcgcgctgcgtgagcgggcgcaatcggtgcccgaggcggtgatgtgcgccaccgactgcagcctggacgagatcgtctcgctcaaacagcagttggaaaagctgcgcggcagcctgatcgatcagatttgatcctccagcgccggacgcaagaacggcaggggtggtctacactggttaataagtgtcaaaaataagtagtgcgcgatttaatcgcaagagataaatatgtgaccggctttacctcgtggaagccgtagtcatctcgccaaccagcaagaaggaatgaacgatgtctattgagaaagtggtttaccgcgctcacgccaccgcaaccggcggccgcgacggccgtgcgacctcctccgacggcgtgttggacgtgaaactgggcgtgccgaaagagatgggcggcgccggcggcgaagtcaccaaccccgaacagctgttcgccgccggttactcggcctgcttcctcggcgcgttgaagtttgtcgcggcgaaagaaaaggtcaaaattccggccgaagccaagatcgacggcaccgtcggcatcggtgaaatcccgaatggcttcggcatcgaagtgcagctggatatctcgctgccgggcatcgagcgcagcgtggcggaagatctggtgaaaaaggcgcatgtggtgtgcccatactccaacgccacccgtggaaatatcgatgtaactctgaacgttaagtaagatttttgccgatatctggaaaaaatggagggtttatccctccattttcttgcgtgccctgtctgaaaaccgctcaaaaaaacggtaaattttgtccgttttgtgagaattctcttgattattacccgcaaaataacgcttattgccggttggctgaaccagaagccgcaatcagtgtctgactgagtcagaaccgctacaccgtccccggagccaccgcgttacatgaacaaagttaaatcgctatcacagcagaatttatcgttattgttagcgatctatatcggcatctttctaaacctatccgttttctatcgccgctttgattcgctggcgcacggcattcagggaattaagcttatttcggcggtgacggaagtcatcgctatcgtcctgtttacgttcttcattatgcggctggtatcgctcggcggccggctgttttatcgcatcgtcgcctcgctgctggtgttgatttcggttgccgccagctactacatgacgtttttcaatgtggtgatcggctacggcatcgtggtgtcggtgatgaccaccgatatcgatctgtcgaaagaggtggttggcctgcacttcgtgctgtggatggtggcgctcagcgccttgccgctgctgttgatctggaaaaacaacctgcgctataccctgatagaacagctgaaaacccctggtcatcgcatcaagccgctgctggtattgctggcggtggtggcgctggtctggctgccgctgcgcatgctggacgacgagcagagcgtgcaagagaagctttccaacgtcgatttgccgagctacggcggcgtggtggcgcactcgtatctgccgtccaactggctgtcggcgctggggctgtttgcctacacccgctatgacgaaagccaggatcagagcacgatgttcgatccgggcaaacacttcacctacgtaccgccggcggacatcgacgacacctacgtggtgttcatcatcggcgagaccacgcgctgggatcacatgggcatgctgggctacgagcgcgataccacgccgcggctgtctaaagagaagaatctggtggcgttccgcggcgagtcgtgcgataccgccaccaagctgtcgctgcgctgcatgttcgtgcgtgaaggcggcaccgaagacaatccgcagcgcacgctgaaagagcagaacgtgttcgcggtgctgaaggatctgggcttctcttccgagctgttcgccatgcagagcgaggtgtggttctacaacaacaccgaggtgaacaactattcgttccgcgagatgatcgcgtccgagaagcgcaacgacggcaaggcggtcgacgatatgctgctggtggacgaaatgaaggagtcgctggcgcgctatccgaagggcaagcacctggtgatcctgcataccaaaggctcgcactacctgtactcgcagcgttatccgcgcagctatgcgcgttatcagccggagtgcatgggggtggacgattcctgcaccaaggcgcagctgatcaatgcgttcgacaatacggtgctgtataccgacagctttatcagtaatgtgatcgaccaggtgcgggacaagaaggccatcgtgttctatgccgccgatcacggcgaatcgatcggtgagaatacgcacctgcacggtacgccgcgcgaaatggcgccgccggagcaattccgcgtgccgatgatcgtgtgggcgtcggacaagttcctcgaaaacccgcagcacctcagcgcttttgagcagctgcaggcgcagcagcgcatcggcaaaacgcatcgccacgtcgagctgtttgacactatccttggctgcctcggctacacctctcctgatggcggcatcgtggataaaaacaactggtgccatctgccgcaggataaaacggcgcctgcccgcctgtgatccctcccgccgggtgcctgccttgcgcacccggtaatttcacccaatacattctcttcatcaattattccggtgtgcgcatacggtatacttgcgcacttcccctgctaaccggagatttccatgaccctgcgcgtggcgtttatcgacgatcatgacattgtgcgttcgggctttgtgcaactgctgtcactggaggccgatattcaggtggtgggcgagttcagcagcgcggcacaggcgcgcgccggcctgccggggctggaggcggaaatctgcatttgcgacatttcgatgccggacggcagcgggctggatctgctggcggacattccttccggcatccgcgtggtgatgctgtcgatgcacgataacccggcgctggtggaaatggctctggaacgcggcgccagcggctttctctccaagcgctgcaagccggaagatctgatcaccgcggtgcgcaccgtcgccggcggcggcgtctacctgatgccggaaatcgcgcagcagctggcgcgggtgagggtcgatccgttgacccgccgcgagcgcgagatcgcgctattgctggcgcagggccaggaggtgcgtgagatcgccgccgccttggggctgtcgccgaaaacggtgcatgtgcaccgcgccaacctgttcgccaagctgggcatcaacaacaacgtcgaactggccagacggatgctgaacctgtgacgcagcgcctgatcacccagctggcgctgtttttcatctacgccgccagcgcgttttgcctgtggggcatcggcaccgcgctgatcgaccccccctggcaggcgctgctgctgtttccgttcggcctgcgcatgggcattttgctgcagagcccgtaccgtttctggccggggatcctgctggctgacctgctgctgatggcgttgctggcggatcagttcggctacggcccggcgctgtgggcgtcggtggcggtgctggtgttgacggtgctgctcagcctgctggcctcgccgtggctgttgcgccatcagcagagcgacagcgaatggcgctggccgctgttgcagggtgcggtggtcgccatcgccgccttgctgcaggcgttggtatggcagctggtgagcggcgaaggcgcccgcgcgctgctgctcggcctgaccggtggtttcaccatcgcgccaacctgcctgctgttgtggcactatctggcgcgccaaatctgggtgccgctggagccggggctgatccacaagccggtggagctgcgtctgggccacctggccagctatctgttgctgtttgcgttcagcatctggctgcagcagcaggttaacgccgccgagctgcgccgtttcgcgccgttctgcctggcgatccccatcgtgttcatgtcttatcgctatggctggcagggcgcgctgttggcgacgctgctcaacggcgtggcgctgatggtcaacgagccgccgcagccggagtcgcaccgcgatctgttgctgtcgctgctggcccaaagcctgaccgggctgctgctgggcgccggcattcagcgccagcgcgaactgaatcagcaactgcggctgcggctggcggagaatcggcagctggcgcgggcgctggtgacggcggaggagcaaacccggcgcgaggtggcgcgcgagctgcacgatgaagtggggcagaccatcaccgtgatccgcactcaggccagcatcgtcaagcgtctggcgccggaaccggcggtgatcggctgcgccgacaccatcgatgcgctggcgctgcgggtctacgacggggtgcacgatgtgctgacccagctgtggccggcggcgctgaacaacctgccgctgtcggcggcggtggcggcgatgctgcgggagtcgctgccgcaggacgcgtcgctggtgagcagcatgcaatggcaggtgcccgacgagctgctggatgaaacgctgaaaatcacgctgtatcgggtgtgtcaggaaggggtgaccaatgtgtgccgccacgccggcgccagtcgcctggagctggatgcgcgcctgcagccgcgcaaaggcgccgcgccgcagatcgccctgaccatccgcgacaacggcgtgggcttcgatgcggaaaaccatcagccggggtacggcctgcgcggcatgcaagagcgcatcagcgccctcggcggcagcctgcggttcaccgctgagcggggcgcctgtttgagtgtgatcttgcccacagtttcaccggcgcaaacgcaaaactaggaaaaactcctaaccgcctcgagaatccggcgtaagccccctgcgcgcgcgaggagcatcatagcggcactttaattcaatcctctgaggttccacatgtggtctttccttaaaagccgcccggatgcgccgcaggtcaccgatcaacggcagatcgacgccagctacaaatactggcgcattcagctgatgtgcaccatgtacatcggttatgccgcgttttacttcacgcgcaaaagcttcaacttcatcatgccggcgatgctgagcgatctgggtctgacgatgtccgacgtcggcatcctcggcacgctgttctacatcacctacggctgttcgaaattcatttccggcatgatcagcgatcgctccaacccgcgttactttatggggctgggcctgatcatgaccggggtgctgaatatcttcttcggcctcagctcgtcgttgatgatgctgggcacgctgtggatcctcaacgccttcttccagggctggggttggccgccgtgctctaaaatcctcaccagctggtattcgcgctccgagcgcggcagctggtgggcgatttggaacacttcgcacaacgtcggcggcgcgctgatcccgctgctggtcggctttatctcgctgcacttcagctggcgttacggcatgatcattcccggcatcatcggcgtggtgctcggcctgctgatgtgctggcgcctgcgcgacaagccatccaccctggggctgccgagcgtcggcaaatggcgcaacgacgccatggagctggtgcaggaatcggaaggccaggggctgagcaaccgcgagatcatcaagcgctacgtgctgaccaacaagtacatctggctgctggcggtctcttacgtgctggtgtatatcgtgcgcaccgcgatcaacgactggggcaacctctacctgacgcaggaaaagggctattcgctgatgaccgccaactcggccatctcgctgtttgaagtgggcggctttatcggttcgctggtggccggttggggttccgacaagctgttccgcggcaaccgtggcccgatgaacctgatcttcgctatcggtatcttcctgtcggtagccgcgctgtggctgatgccgggcgtgacttacctgctgcaggcctgctgtttcttcgccatcggcttctttatcttcggtccgcagatgctgatcggcatggcggcggcggagtgctcgcacaaggatgcggcgggcgccgcgaccggtttcgtcggcctgttcgcctacctgggcgcggcgctgtccggctacccgatcgcgcgagtgatggagatctggcactggaacggcttcttcgtggtgatttccatcgccgcctgcctgtcggcgctgttcctgctgccattcctgcgcgcgcagacgccggcgctgaaaccggccaacgcctgagtaaaatacgctgcgcaacccccggcgcagcgtattatggcgcttttatcaccacttgaaatgcaggggcaaaaaagtgattgacgcctataaccgccagcagtaagatgcgccccgcatcggcgagtagcgcagcttggtagcgcaactggtttgggaccagtgggtcggaggttcgaatcctctctcgccgaccaccattcgaaaaacctgcttttaaagcaggttttttttcgtctgcggtttatgaggatgagtacctccgcaggaggttcgagcctcgcgaagcgagacaacgttgctttagcaacggcccgcagggcgcgcatcaacgatgcgcgtaatcctctctcgccgaccaccattcgaaaaacctgctttttaaagcaggttttttttcgcctgtcgtttaggcggctttgcctactacgaagtcaaaatggatttcgtcataggggaaaatcacgccttgttgacctttatcgacgatgccgcagcctaacagcgcctgcagatcggtatgcaccgctttcacatcgcgtttcactcggcgcgcgacttcccgaatggaaagttcgccggcgccggtcatggtatgcaagatatgcattttcttgggtgataaggctttccacagactctcccaatccaggaatgtgatgtaatgcccttgagcgctttgctggcctgttgcggcttccttcagtgcgagtttcatttcttcgacggaagcgactcgaatggtgactgtattcatcatgattcctctgtgagcagcataacctcgcgccagaaactgtcgagcaaggcatcaatggtcgtgaaattaagcggctcttcttttccatcgatatgtttgtgatcgcctttacctgcttcattgtcatagcgcagtcgacaaatgccgtcttttacataagcaaatcggtatttataactgtggccgctggccttgacgggcggcaccacccgccaaatgacgagctgcgcaaatgcggcaggcgtcaagggtatcctgtcttggtagattagctgcgaaggcatgctctttccttaagtgttgttcacagtaccaacacagtcagggtattgtcaataatgacaacaccctgactgcagagtgtggtgcaatcctgataaatatttatctttccttaataaaaaattcactatccatatttgtcgtgctttcttttatttatattaaaataaattcacgcttgctgaataaaacccagttgatagcgctcttgttttcacgccttttttatttatagtctgaatgtacgcggtgggaatgattatttcgccacgtggaaagacgctgttgctatttattgattttaatcttcgaggattattgcggaattttttcgcttcggcaatgcatcgcgacgattaactcttttatgtttatcctctcggaataaaggaatcagttatgcgcaaatttaataaaccgctgttggcgctgttgatcggcagcacgctgtgttccgcggcgcaggccgccgcgccgggcaagccgaccatcgcctggggcaacaccaagttcgccatcgttgaagttgaccaggcggctaccgcttataatagtttggtgaaggtaaaaaatgccgccgatgtttcggtctcctggaatttatggaatggcgacaccggtacgacggcaaaagttttattaaatggcaaagaggcgtggagcggcccgtcaaccggttcttccggtacggcgaattttaaagtcaataaaggcggccgttatcaaatgcaggtggcattgtgcaatgccgacggctgcagcgccagcgacgccaccgaaattgtggtggccgacaccgacggcagccatttggcgccgttgaaagagccgctgctggaaaagaataaaccgtataaacagaactccggcaaagtcgtcggttcttatttcgtcgagtggggcgtttacgggcgcaatttcaccgtcgacaagatcccggcgcagaacctgacccacctgctgtacggctttatcccgatctgcggcggcaacggcatcaacgacagcctgaaagagatcgaaggcagcttccaggcgctgcagcgctcctgccagggccgcgaggacttcaaagtctcgatccacgatccgttcgccgcgttgcaaaaagcgcagaagggcgttaccgcctgggatgacccctacaagggcaacttcggccagctgatggcgctgaaacaggcgcatcctgacctgaaaattctgccgtcgatcggcggttggacgctgtccgacccgttcttcttcatgggcgataaggtgaagcgcgatcgcttcgtcggttcggtgaaagagttcctgcagacctggaagttcttcgatggcgtggatatcgactgggagttcccgggcggcaaaggcgccaacccgaacctgggcagcccgcaggacggggaaacctatgtgctgctgatgaaggagctgcgggcgatgctggatcagctgtcggcggaaaccggccgcaaatatgaactgacctctgccatcagcgccggcaaggacaagatcgacaaggtggcttacaacgttgcgcagaactcgatggatcacatcttcctgatgagctacgacttctatggcgccttcgatctgaagaacctggggcatcagaccgcgctgaatgcgccggcctggaagccggacaccgcttacaccacggtgaacggcgtcaatgcgctgctggcgcagggcgtcaagccgggcaagatcgtggtcggcaccgccatgtatggccgcggctggaccggggtgaacggctaccagaacaacattccgttcactggtaccgccaccgggccggtcaaaggcacctgggagaacggcatcgtggactaccgccaaatcgccggccagttcatgagcggcgagtggcagtatacctacgacgccacggcggaagcgccttacgtgttcaagccttccaccggcgatctgatcaccttcgacgatacccgctcggtgcaggccaaaggcaagtacgtgctggataagcagctgggcggcctgttctcctgggagatcgacgcggataacggcgatattctcaacagcatgaacgccagcctgggcaacagcgccggcgttcaataatcggttgcagtgcgttgccgggggatatcctttcgcccccggctttttcgccgccgaaagtttttttacgccgcacagattgtggctctgccccgagcaaaacgcgctcatcggactcacccttttgggtaatccttcagcatttcctcctgtctttaacggcgatcacaaaaataaccgttcagatattcatcattcagcaacaaagttttggcgttttttaacggagttaaaaaccagtaagtttgtgagggtcagaccaatgcgctaaaaatggccgcttagcataaattttcatgctggaactgttaacaaaaagttttttttatgtttgtttgctgtttctcacagtctgcgtaaatccccactggttatattgacgacaccccaaacagttggcaacttgatagcctcaggggtaagagcgagagttgtttgagtgaattccacgcgctcagacatccccgccgcgatgcgttccatccggcattctctcctcgtacgccttctgccttcgggcgccgatcgcacaggccacgcaataaaaaatacaggtctggcggcaattacacacatcacatcacacaatggagcactaacgatgacacgttccttgggtaaatcggggattctgaaattcggtattgggctgatcgcgctgaccgtggcggccagcgtacaggccaagacgttggtttactgttctgaaggttccccggaagggttcaacccgcagctgtttacctccggcaccacctatgacgccagctcggtaccaatctacaaccggctggtcgaattcaagaccggcaccaccgagctgcagccgggcctggctgagaagtgggacgtcagcgaagacggcaaaacctacaccttccacctgcgcaaaggcgtgaagtggcagagcagcaaagacttcaaaccgacgcgcgatttcaacgccgacgacgtggtgttctcctttgaacgccagttggatgcgaacaacgcctatcacaaagtgtccggcggcagttacgaatactttgaaggcatggacatgccgaagctgatcgccaagatcgaaaaagtggacgacaacaccgtgcgcttcgtgctgaaccgcccggaggcgccgttcctggctgacctgggcatggacttcgcatccattctgtccgccgaatacgctgacgtgatgatgaaagccggcacgccggagaaagtcgatctgaacccgatcggcaccggcccattccagctgctgcaataccagaaagactccaagatcctgtacaaggcgttcgacggtttctggggcaccaagccgaagatcgatcgcctggtgttttccatcacgcctgacgcctccgtgcgctacgccaaactgcagaaaaacgaatgccaggtgatgccgtatccgaacccggccgatatcgcccgcatgaagcaggacaagtccatcaacctgatggaacagccgggcctgaacgtgggctatctgtcgttcaacgtcgagaaaaagccgctggataacctgaaggtgcgtcaggcgttgaccatggcggtcaacaagcaggcgatcatcgacgcggtttatcagggcgcgggccaggcggccaagaacctgatcccgccgaccatgtggggctataacgacgcggtgcaggattacgcttacgatccggccaaggcgaaagagctgctgaaagaagcgggcatggccgacggtttcagcatcgatctgtgggcgatgccggtacagcgtccttacaacccgaacgcgcgccgcatggcggaaatgatccaggccgactgggccaagatcggcgtgaaagccaaaatcgtgacctacgagtggggtgaatacctcaagcgcgccaaagcgggcgagcaccagacggtgatgatgggctggaccggcgacaacggggatccggacaacttcttcgccacgctgttcagctgcgcggcggcgaaagacggctccaactactcccgctggtgctacaagccgtttgaagatctgattcaaccggcgcgcgccgaatccaaccacgacaagcgtatcgaactgtacaaacaggcgcaggtggtgatgcacgatcaggctccggcgctgattgtcgcacactccaccgtgtatgagcctgtgcgtaaggaagtgaaaggctacgtcgtggatccgctcggtaagcatcacttcgagaatgtctctgtagactgatttcgaccgctttaccggagacgcacgaatggacttgcaggggcgcaacaggtttgcgcctctgctgaccagtctccggcgtatggccgtcgaatcgttcaaaggcatgtgagcgttaataagcctggcggacgatgagctgccgggcattgatacagagagttcgggatatgttgcagttcatactccgacgtttggggttagttatcccaacgtttatcggcattacgttgctgacttttgcattcgtccatatgatccccggcgacccggtgaccatcatggccggggaacgcggtatctccgccgagcgccacgcgcagctgatggcggaaatggggctggacaagccgctctatcaacaatatttctcctacgtgtccaacgtgctgcacggcgatctgggcacctcactcaaaagccgcatctccgtctggagcgagttcgttccgcgcttccaggccacgctggagctgggtttctgcgcgatgctgttcgcggtgctggtgggcatcccggtcggggtgctggcggcggtcaaacgcggttcggtcttcgatcacaccgcggtgggcatctcgctgaccggctattcgatgccgattttctggtggggcatgatgctgatcatgctggtgtcggtgcagcttaacctgacgccggtgtcggggcgcatcagcgacacggtattcctcgacgacagccacccgctgaccggcttcatgctgatagacaccctgatctggggcgagcctggcgacttcgtcgacgcggtgatgcacatgatcctgccggccatcgtactgggcaccatcccgctggcggtgatcgtgcgcatgacccgttcctcgatgctggaagtgttgggcgaagactatatccgcaccgcgcgcgccaagggcgtgagccgcatgcgagtgatcgtcgtccacgcgctgcgcaacgcgctgctgccggtggtgacggtgatcgggctgcaggttggcaccatgctggccggcgctattctgacggaaaccatcttctcttggccggggctgggccgctggctgatcgacgcgctgcagcgccgcgattacccggtggtgcagggcggggtattgctggtcgcctgtatgatcattctggttaacctgctggtagacgtgctctacggcgtggtcaacccgcgtattcgccacaagaaataaggggcgctctcatgtctcaaatcactgagtctgcagttaaaggtgcgccgaagccgatgaccccgtttcaggagttttggcactatttcaagcgcaataaaggggccgtggtcggcctggtgtacatcgttctgatgctggtgatcgcgctcggcgccggcgtgctggcgccgcatgcgccggcggaccagttccgcgacgcgctgctcaagccgccggtgtggcaagaaggcggcagctggcaatatatcctcggcaccgacgacgtgggccgcgacgtgctgtcgcgcctgatgtacggcgcacggctgtcgctgttggtcggctgtctggtggtggtgctgtcgctgatcatgggcgtgatattcggcctgctggccggttacttcggcggcgtggtggacgcgattatcatgcgcatcgtcgacatcatgctggctctgccgagcctgttgctggcgctggtgctggtggcggtattcgggccgtcgatcgtcaacgcctcgctggcgctgaccttcgtcgccctgccgcactatgtgcgtctgacgcgcgcggcggtgctggtggaggtcaaccgcgactacgtcaccgcttcgcgggtggcgggcgccggcgcgctgcgccagatgttcgtcaatattctgcctaactgcctggcgcctttgatcgtgcaggcttctctcggtttctcgaacgccattctggacatggccgctctcggctttctgggcatgggcgcgcagcctccgacgccggagtggggcaccatgctctccgacgtgctgcagttcgcgcaaagcgcctggtgggtggtgaccttccccggcctggcgatcctgctgacggtgctggcatttaacctgatgggggacggtttgcgtgacgctctcgaccccaaactcaagcagtaacagaggacgagagagatggcgttattgaatgtagacaagctttcggtgcacttcggtgacgaaggcaccccgttccgcgcggtagaccgcatcagttacagcgtggagcaaggtcaggtggtcggcatcgtcggtgaatccggctccggaaaatccgtcagctcgctggcgatcatgggcctgatcgatttccccggcaaggtgatggccgacaagctggagttcaacggccaggatctgcgcaagatctccgaaaaagagcgccgccagctggtgggctccgaagtggcgatgatcttccaggatccgatgaccagcctgaacccgtgctataccgtcggttaccagatcatggaggcgctgaaggtgcatcagggcggcaaccgccgcacccgccgtcagcgcgctatcgacctgctgacgcaggtgggcattcccgatccggcttcgcggctggacgtatacccgcaccagctttccggcggcatgagccagcgcgtgatgatcgccatggccatcgcctgtcggccgaagctgctgatcgccgacgagccgacgaccgcgctcgatgtgactatccaggcgcagatcatcgaactgctgctggatctgcaacagcgcgaaaacatggcgctgttgctgatcactcacgatctggcgctggtggcggaagcggcgcatcacatcatcgtgatgtacgccggccaggtggtggaatccggcaaggcggcggagattttccgcgcgccgcgccacccgtacacccaggcgctgctgcgcgcgttgccggagttcgccgccgacaaggcgcggctggcttcgctgccgggcgtggtgccgggcaaatacgatcgcccgaccggttgcctgctcaacccgcgttgtccgtacgccaacgaacgctgccgtaacgaggagccggaactgcgcagcattcccggccgtcaggttaaatgtcacacaccgctggatgatgcggggaggccgaccgtatgagccagaatcaacctttactgcaggcgattgacctgaagaagcattacccggtaaaaaagggcctgttcgcgccggagcggctggtcaaggcgctcgacggcgtgtccttcaccctggagcgcggcaaaacgctggcggtggtcggtgagtcgggctgcggcaaatcaacgctcggccgcctgctgacgatgattgaagtgccgaccggcggcgagctgtattaccaggggcaggatctgctgaagccggacgtctcggccgagaaactgcggcgccagaagatccaaatcgtgttccagaatccttacggatcgctcaacccgcgcaagaaggtcgggcagatcctcgaggagccgttgttgatcaacacgtcgctcagcgccgccgaacggcgggaaaaagcgctggagatgatggcgaaggtcggcctgaagaccgagcattatgaccgctacccgcacatgttctccggcggccagcgccagcgtatcgctatcgcccgcgggttgatgttgaatccggacgtggtgatcgccgatgaaccggtgtcggcattggacgtgtcggtgcgcgcgcaggtgctgaatctgatgatggatctgcagcaggagctggggctgtcctatgtgttcatctcgcacgatctgtcggtggtggaacacatcgccgacgaggtgatggtgatgtacctcggccgctgcgtggaaaagggcagcaaagaggcgatcttcaacaacccgcgccatccgtacacccaggcgctgctgtcggcgacgccacggttgaacccggatatgcgccgcgagcgcatcaagctgaccggcgaactgcccagcccgatgaatccgccgccgggctgtgcgttcaatgcccgctgccgccgcgctttcggcacctgtgtgcagctgcagccgcagctaaaacagtacggtgagcagatggtggcctgctttgcggtcgatcaggacgaacatccgggggcgtaaagcgtcgaacgtcatcgcttaaattcacgccggcatcacgccggcgttttttattactcaatcaaagggttaataagtagaaaactaccacagtccgccattttaattacctccctaattaaattctgataagagttatttttctaagaatcttcgcatgagaataataatctaattatggaattcaacgggttgttgttaataacattatatcggcctatcggcttcaccatttttattataaaagcccaaaaaaaacgcgccgtcggcgcgctttaggttgatgaggccgcgcttattgcggataaggcacccagtcgccgccgttcaggcgaatgtaaggtttcccctgatattgcatcacgatggcgttgtcgttttcggagatgaccggggtctgcggcagcccctgggtcagcgcctgccagtcgacgctggattcgctgaagaccttgccgtccaccagacgtgataccagctccgacagcgccagatagctgctcggcgttttgatctgcagcgggctgccctgatgcggcgccttcatgcccaccagtttgatgccgaccggcgtatgggtgatgttcgggctgggaatatcgcgcaggccggacatttgcatcttgtcgcccaccaacgccgcgccgtgctccggcacgatcaccaccaccactttgcggccggatttttccagctgatcgaggaaggtgttcagctgatcgaacagcttctgcgcgcgcggctgatagtcggcgctcttgttggagccgacgaagcggttgccgtcgtgcagcgggatgacgttgaagaaggtggcggtgcgggcgtctccggctttttgctgctgatccagccagcgggtcagcaattccagatcgttataaatcggctcaccgtcgaacgacgtcagctcgttgccgatgccggcctgcgacattaacggcgcctgcatgtcgccctgttcacgcagctctttcaggtagttgccgaacacaccggagtgatcgagcatcagctgttgcctgaagccgagcttcgccaggttgtcgaacaggtaacactgctggttcaccggctggtacaaatcatgatgcgaaagctggccgcagctggcgcgcagcaaccgtatcgaggccgggccgctgtaggcggtggccgagttgaagctgtcgaacatgatgtccatcttcgaccacagcggatgattctgcaggttgaccgcctccatatcggcccaggccagcgaacagatgttgatcaccagcagatcgaacggttgggcgtcggcgggcaaggtggccgggaacgcggtggcgcggcctttttcccgctcgtagaactggttcaggtaggccgtcaggttggcgctggtcggcggcaggctgtctgccggcgcagcgtcccccgccgccggcgctgatgtggccggggtattggcgccgccggcggcagccgtggaagtggcgggcagcagtgaaaccgccggcccggcgatgttgacgatattgagccacaccagcgccgccacggtgaacaccgtgacgcgcacccactgtgcgacgaacaggtaggcgataaacagcacgaaggccgcgccgatcatctgccagttgataaagcggttgatcagctccagcagatactgggcgctgaaaccggccagctgcgagccctggctgaggatgctgttgatgcccggcagccaggtgtcgtggtagaacagcgcgatgccgatcgggatagcgaggtaatggcgccagcgatgcaggcgttgcgaagggatcggcatcagcagaaacgccatgaacaccaggttcggtagcgcgtggaaattcaggtagccgaaccacagcagggcgaatttggccagaaagtagaggttccagccgcccagcccgcgccagtagcgccacagagcgttatcggattgcgtcttcgagtttggattcatggctgcttcttacgtttaatctgagatgaggagcctgtgcgcacccataaaccggcggatttcaaatagcgcggcgataacaacaggttttgccagtattgacgcaaatgcggaaaacgccggtgaaaggcgtagcccagcggaatgaagatcagcgcgcacagcaggatcagttgcacgatgtcgttaaggttcagcatgcggttcctcctgcgggccaagcggcagcgtgaaggcgaccggctgccgccgttccgcgggcacctcggctgccgccacgcgggggcgcggcgcggcaccggcggcgccggtggccgaaatctgccagcgcccctgggccatgcgttttatttccgaaatgatatcgacatcctggtgccacaccacccggttgctgaaggcttcatccaccggcaggcggaagatgaacttcagcgcggtatccagatcgttgatgcggcaggtggaaaggaacagcaccagccgcccctgcaccacggtcatcacgtcgccgaaccgccgcaggtggcacagggtcatcgcctgttcggcgcgcaggccggtggccgggcgcagcgccaccatcacgcctttgccgtcctcaggcagcagcgtgttgcccatcagtgaaagcaccgcttggctgaacgcttccggccgcatgtagcctttgagctgcagcggacgcagcccggccagcagcgcatcgatgtcggcgggcacatgccgtgagaagcgctgcccctggatgccctcgagcatggtcagaaaacgcgacagcggcgcgacgtgcggcacgatcaggttggcgccgcaggccagcagcagccgttcgtcgctgtagcgcaggctggcgctcatctcgcgcaccgcgattttcaggccgttgccgcggctgcggcgcagggtgtggatctggtgcgccagatgatcgatttggtcgctttgatacaacgcgaaaatcaacgtcgccgagagtctcagcatgccgtgctgcgccagttcgtcgttgctctccagcagttgccagttggcggacagcggcggcgcgccttccaggatgctgcgctcggccagatactggctttcgtcgctgcgtaaggcggtgggggagggttggctattttcatcctcgccctgccagccgccttccgccgcatacaaggtcagcagctggttggcgttgatgccgttttcggtgctccaccagttcaccaggtattgcgcgctgtcctgctgccattgcaggctggacaggccgttcaggatgcggtgctgtgcgctgagctgccctttgagcttattgatgccgccgccgtggctgaggatcaacagcgtacagccctgccgccgcagccaggcggcgagggtgcgcgtccactcgcgcagctcttcggtggtgaaggtttgccacaggctggcgtgggccagcaggataagtaagcgattttgcggccgcagggcgcgcatcagatcgtcgttcaactgtgtcagcgcggcttttttctccggtaattgatacagcggcagcttctgcaacgcgggcgcagccagttcggccagcaggcgctcgggtttgtcgccgctgcagatcagggcgactttgtgagtggccggttgagcggcgatgacctggcgacacagcagcgcggcgtcgctttgcctgtcgatattgatccaataaagcccgggggcctgcatcaccgacagctcttcccaaatctgccgaatgcctagagaaaaagagtgcgccataggatgtattctactttcgttgaaagccgactaaaggcgtttatatttaaagatagccatttttacgctggcaataacaaatctccgacgctcttcaacaatatttgttgagaatcatcttattgcctctctctttttgtatcgttgctatagttaattaacatagcctattttcgccaaggcggaagaatgaataacgcacccacccattttcgtgcagcggcgcctggggagagccaggatgacctgcaggcgctcagccaggctttttcattgccgaaattacgctatgtcgatatttcgcggcaggagcggttaacgcaaatgatgacgcgctggccactgttggccgaattggcgcagaccacggggagccactgatctatgccggtgctcgcgctgcaagggttgcggggtggaatggggacgacctcggtcacggcggcgctcgcctgggcgttgcagcagctgggcgagtcggtgctggcgatcgacttcacgccggataatctgctgcgcttgcatttcaacaccccgttcgagctggcgcgcggctgggcccgcgcggagcgggatggcggcgtttggcaggaaggcgcgctgcgttattgtgaaaacctcgactttctgccttttggccgcctgaatggggcggaacggctggaagtgcagcaccagtgtcggcaacagccggaacgctggcgcgacaacctgcgccaactgatcgccggcgatccgcagcgctggatcctgctggatgtcccggtcggggacggcgtgctggcgcagcaggcgctgcagcttgccgacagcgtgttcgtgctgttgaaccccgatgccaactgtcaggtgcggctccatcaacagacgctgccgaatgactgccgtttcctggtcaatcactactcctccgccagccagctgcagcaggatctgcatcagctgtggctgcaaaccctgagcggcctgctgccggtggtgatccaccgcgacgaagcgttggcggaagcgctggcggtcaaacagccgttgggcgagtatcgccccgagagcctggcggcggatgaagtgctgacgctggccaactggtgcctgatcaacctcaaacggggcgttgccccatgagccgggtgctgagcctgctgctggtaccgccggtgcgtcaggcggtgcaggcgcgctaccgcggctatcgccgcaacggcgcgtcggcgctgaccgcctttttcgccacgctgttggtggcgctggggtggatgctgctgcgcttcgagtcaccggcctggcagcgcgtgcgcgtcggccgcgcttactggttcccgcatctgtccgccgaacgcccgcgcccggcggatgcgctgcgctatctgctgcagggcctgtggctgctgctgtttcgcagcggtcgcgcgccggtgccgcgcgactatttcgccgggtggcggcggctgcagcagcgctacgccgattggctgcagagcctgccgcaacggctgaaaaacgccggcgtggaacagcgttcggtagagcgcctcggccgcatgaaccgcggcatgcgacgcgcgctgtttattctggtcggcgtgctggcggcgatcctcgccatactgtgcatttcgcagccgttcgatctgtcggcgcagttcgtgttcgtcgtgctgctgtgggggatcgcgatggtggtgcgccgggtgccggggcgtttgcctgcgctgatgctgatcgtgatgtcgctgaccgtgtcctgtcgttacctgtggtggcgttataccgccacgctgaactgggacgatccgctcagcctggtgtgcggcctgttgctgctggtggcggaaacctacgcctgggtggtgctggtgctgggctatttccagaccatctggccgcttaaccgccagccggtgccgttgcccgaagacagcgccacctggccgaccatcgatctgatggtgccgacctacaacgaagacctcggggtggtgaagcccaccctctatgcggcgttgggcatcgactggccgaaagagaaagtgaacatctatatcctcgacgacggcaatcgccccgaattccgggcgttcgccgccgaagtgggggtgaaatacatcgccaggccgacccacgaacacgccaaggccggcaacatcaacaatgcgctgaagcaggccaccggcgagttcgtggcgattttcgactgcgaccacgtgccgacgcgctccttcctgcagctgaccatgggctggttcttcaaagacaaaaagctggcgatgctgcagaccccgcaccacttcttctcgccggatccgttcgagcgcaacctcggccgcttccgccagacgcccaacgaaggcactttgttctacgggctggtgcaggacggcaacgacatgtgggacgccaccttcttctgcggctcttgcgccattctgcgccgcagcgcgctggacgagatcggcggcatcgcggtggaaaccgtcaccgaagacgcccatacctcgctgcgtttgcaccggcgcgggcacacctcggcctatatccgcattccgcaggccgccgggctggcgaccgaaagcctgtcggcgcacatcggccagcgcattcgctgggcgcgcggcatggtgcagatcttccggctcgacaacccgctgctgggcaaggggctgaaactggcgcagcgcctgtgctacgccaacgccatgctgcacttcctgtcgggcattccgcggctgatcttcctcaccgcgccgttggcgtttttactgctgcatgcctacatcatcttcgcgccggcgctggcgatcgcgctgtatgtgctgcctcacatgatccacgccagcctgaccaactcgcgcatccaggggaaataccgccattcgttctggagcgaaatctatgaaacggtgctggcctggtatatcgcgcggccgacgacggtggcgctgttcaatccgcacaagggcaaattcaacgtgaccgccaagggcgggctggtggaggaggagcacgtcgactgggtgatcacccggccttacatgttcctggtggtgcttaacctggctgggctggcgttcggcgcctggcggttggcctatggcccgacggacgaggtgatgacggtgatcatcagcctggtgtgggtgctgtacaacatgaccattctcggcggcgcggtggcggtggcggtggaggccaagcaggtgcgccaggcgcaccgcgtggagatcgccatgccggcggcgatcgcgcgtgctgatggccacctctacccctgcacgctgcgcgattactccgatggcggcgtgggcattgagatgcgggtggagaatgcgttgaaagacggcgacaaggtttcgctgttgctcaaacgtggccagcaggaatacagcttcccctgtgtggtgacgcgcgccttcggcaacaaggtgggggtgcgtctggtcagtctctccacccgtgaacacatcgatttcattcagtgcaccttcgcccgcgccgatacctgggcgctgtggcaggacgggttccctgaagaccggccgatcgaaagcctgcgcgacgtgctggcgttgggcttccgcggctatgtgcgcatggcggactacgcgccgccgctggtgcgcggcctgctggtcggggtcacttcgctgaccgcctgggtagtgtcgtttattccgcgcggcgtcggcagggatccgaccttgggtcaacaagaaaccgtgggttagctgcgagttcaaccgcccgctcactcgcccggtgaacaggctccaacattgatgatgatacgatgacgagaaaaataacctggttaactgctctggccttaggcatcagcaccctgtcgcaggccgaaaccgccaccgcgccgaccgtggcggcccagccgccgatcgccgcggcggccgatacggcgaccgcgccgcaggatccgaatgcgccggtgcgcgacgtgtcgctgccgttcgcgcagatagcgccgccgccgggcacctttgttctgcgcggcacccggccggacgggcagatcgagttcggcgtgcgcagcgatgaggtggtctcgcaggcgatgctcgacctggaatttacgccgtcgccggcgctgatcccggtcgagtcgcacgtcaaggtctatctgaacgacgaactgatgggcgtgaccacgatctccaaagagcagctgggcaagcccaatcgcatccagatggcgatcgatccgcgctatatcaccgattttaaccgcgtccggctggtgttcgtcggccattatcagaacatctgcgaaaacccggccagcacttcgttgtggctcgacgtcagccaatccagcgcgctgaagctgcgtttccagacgctgccggtgaaaaacgagctgtcgcacttccctgagccgttcttcgacagccgcgacaatcggccgctgacgctgccgatggtattcgccggccagcctgatctcgcccagcagcgcgcggcgggcattctggcctcctggttcggcagcaaggcgcagtggcgcgggcaatccttcccgacgctgtacaatgcgctgccggcgcagcacgcggtggtgttcgccaccaactcacagcgcccggatttcctgcgcgattatccggcggtcaacggcccgacggtggagatgatcagccaccccgacaatccgtacgtcaaactgctgttgattcaggggcgtgacgacaacgatttgatcaccgcggtgaagggtatcgcgcagggtaacatcctgttccgcggccagaacgtgacggtggacaaggtggaacagctcgcggcgcgccagccttacgacgcgccgaactgggtgcgcaccgatcggccgatgaccttcgccgagctgcagcaatatgccgaacagctgcaaaccagcggcatcgaacccggcccgatttcgctgaccatgaacctgccgccggatctgttcctgatccgcagcaccggcatcgacatgcacctgaaataccgttataccgcgccgcgcattcaggacggttcgcggctgagcgtcagcctgaacaaccagttcgtgcaggcttactcgctggtgccggaacacgagcagggcgcgcagctgctgcgactgccgctgacgcaggggctgctcgactctgacaggaacgtcagcatcccggcgttgcggctgggcgccaccaaccagctgcgctttgactttgactacaccacgctgctggccagcggcgcggaagggcgctgcgaaacctactccttcacgcaaaaccacgcggtgatcgacggcgcgtccaccatcgatttctccggctatcgccactttatggcgatgccggatttgcgcgccttcgccaacgccggcttcccgttcagccgcctggcggatctgtcgcaaacgctggtgttggtgaaccagaaaccgcagccggcgcaggtcagcgcgctgctgaacgcgctcggcgtgatcggcgcgcaaaccggctacccggcgctggcctttacgctgagcgacgactggtcgcaggccaaggatcgtgacgacgatatcctgatgatcggcaccattccgccggcgctgcgcgacgacaagaaaatcagcctgctggtggacgccactcaaagctgggtgaagcagccgacgcgccaaccgccgttgccgagcgcggaattgctggcggaggacgccaagccggacagcaaaaccaccgtcagctccgagggcgcaatgtcggcgatcatcggtgtgcaatcgccgttcaacgatcagcgcagcatcgtggcgctgctggcggacagcccgcgcggctatgagttgctgaacaatgccctgctggacagcggcaagcgcgccgcggtgttcggctcggtggcggtgatccgcgaatcgggggtcaacagcctgcgcgtcggcgatgtttactatgtcggccacctgccttggtgggagcggctgtggtatgccctctccacccatccggtcctgctggcggtgctcgcggtggtgctggtggtgatcctggggctgatgctgtggcgcggcctgaaggccttcagccggcggcgtctggcgcctgaagatcgggattgacggcggtgaacgcgatgctgcaacgcctgtcgctcggcatgctgctgctgtgcgctttcagcgcggcggcggcctgcgagtggccgggctggcaacagtacaagcagttctacatcagcccacagggacgggtgatcgacccgagcagcccgaacaaaatcaccacctctgagggccagagttacggcctgttcttcgccctggtggccaatgaccggccgaccttcgaccagctgttgacctggacggagaacaatctggcggcgggcgatctcagcgcccgtttgcccgcctggctgtggggcgagagcgacgataagcagtggaaggtgctggacgccaactcggcgtcggacgccgatctgtggatcgcctacaacctgctcgaagccggccgcctgtggaaaagccggcgttatcaaaccctggggacgctgctgctgcaacgcatcggccgcgaggaagtggccgacattcccggcctgggcctgatgctgctaccgggcaaagtcgggttcgtggcggaagatcgctggcggctgaatcccagctacctgccgccgcagctgttggcgcgttttgcggcgctgaacggcccatggcgcgcgatgcgcgaggtcaatcaacggctgtggctggacaccgcgccgcacggtttctcaccggattgggtggtgtggcgggtcggtgccggttggcagccggacaccgtcaagccgaacgtcggcagctacgacgccattcgggtttatctgtgggccggcatgctggcggacgacgatgaacacaaggcggcactgcttgaacgcttccagccgatggcgcagttcactgccaaacagggcgttccgccggagaaaaccgataccgccagcggcaaaaccaccggagacggcccggtcggtttctccgcttctgtgctgccgatgctggcgacgcaggctgaagcgctggcggtgcagcggcagcgcatcagcgagcacccgccgggtgacgacgcctatttcagcgcttcgctgacgctgttcggtcaggggtgggatcaacaacgttatcgctttaatcgtcagggtgaattgcaaccctcgtgggacggccaatgcacaacttcaaaataaactggctgaatttgattccgctgagcctggcgatgctgccgcaggcgcgcgctgcggaggccgtggccccggaacagtggctgctggaacaggtgcgcattggcgaggccggcaacaaggacgatctggtgcgccagtcgctgtaccggctcgagctgatggatccgaacaacccggacgtgatcgccgcgcgcatgcgtttggcgctgcggcagggcaacctggcgctggcgcagcagcagctggacaagctgaaaaccctcgcgccacagtccagcgcctatcgccaggcgcaaatgaacatgctgctgacccagccggaaacccggcaaaagctgcagcaggcgcgtctgatggcgaccgccggccggttgccggaagccaaggcgcagtacgatgcgctgtttcacggcgagccgccgacgctcgatctggcggtggaatactggcggctggtggcgcgtttgccggggcaggaggcgaaggcgttaaagcagctgcaggcgctggatcagcaatattcaggcaatgtggcgctgcgtatgtcgctggcgcgtatgctgttcagtcagaaccaggacgcgcaggcctatgaactgctgcagaagatcgccgccgatccggccgggcgcggcgatgccgccgatctgtggctggacaaggtcaaagcgatgccggtcagcgcgcagagcgtggcggcgctcaaccgcttcctcggcgtgttcgacactggcgatcaggcgaccagcgcccgcgaagagctggccagacagcagaaattgttggccgatccggcctatcaggcgcgggtgcgcggcctggcgcaggtggataaaggcggcagccgggcagccattcctgagttgcaaaaggcgctggcggcggcgccgaacgacgccgaggtgctgggggcgctcggccaggcctactcgcgcgccggcaaccgcccgcaggcgctgaagctgtttcgccaggcgctggcggccgacaagaacggctacgacagcggcaagtggcagagcctgatcaaaagcaccagctactggctggcgatcgacgagggcgacaaggcgctgaaggccggcaatctcgcgctggcccggcagaaatatcagcaggcgcgccagctcgacgacagcgacggcgatgcgttcatcggcctgggcgatgtggcggtggcgagcaaggatgacgccgcggcggaagggttttatcagcaggcgttgcgacgcgatcccggcaacggcagcgcgctgcgcggcctggtgaatatctatcagcgccagtcgccggaaaaagcgctggcctacctcaacggcctgccgcgcagccaacaggccaagctgcgcagcaccctcgacggactgcggctcgatatgttgaagcagcaggcggagacgctggcggcacagcagcagtggcggcaggcggcagaaatctatcgccgcgctcagccgatggatcccgacgacgtctggctgacctatcgctatgcgcaggcgctgcgtcaggccgggcagccgcagcaggcagacgctctgttccggcagctggcgcagcgccaacatgccaatccgcagctgacctacgcctatgcgctctatctttccggcagcgatcgcgacaggcaggcgctggcacaactcaatacgctgcctgcggcacagtggaacgacaacatgcgcgagctggcgcagcggctgaaaatgcaggcggtaatcgagcatgccgaacggctgcgggcggccggtgacgaaccggcggcggaagcctatctgcgccggcagccggcggacacgcgcatcgatttgctgctggccgactgggcactggcgcgcggggagtatgcggcggcgctggacgactatcagcgggtgaaacggcgtgagccgaacaacccggatgcgcagctgggcgagatcgaagcctatgtggcgcagggggatctggacgcggcgcgtcaacggcttaaaaccgaaccgcagccacaagacgcttcgctcaacagccagcggcgagtcgccaacgcctggggggcggtcggcgatccgcagcaggccgaagctatcttcggccgactgaaaacggcggcggcttcggagcccgtcggacagaccaaggcgctggtttaccgtgacgccgcccggctggagcgggctcagcaacagcctgagcgggcgcagcaggattaccgccaggcgatggtggccagcggcattacgccgacgctgccgcaggataatgacagctacacctatttgacgcgcaataatccgagcgacgactggctgaaacgcggcatccgctccgacgccgcggatctgtatcgacagcaagacgtgaacgtcacgctcgatcacgattactggcgctcgagcggcaccggcggcatctccgacttcaacgcgcacgacaccatgctgcaggtggacatgccgctgcatgacgggcgtgccttcttgcgcaccgacaccgtgcagctggatgccggccgcttctcgaccgacggcagcggcaaatactacgaaaccttcggcacctgccacacgcaagggtgccgcggcgatgaacatcagaaaaccaccggcaccagcgtggcggccggctggaaaaacgatcgctgggccgccgacatcggcacgacgccgatgggctttgaggtggtcgactggaccggcggcctggcctacagcggcgactggaaccacattggttggacgctggcggcctcgcgacggccgatctccagctcgctgctggcgttcggcggcgccaaagacccgaataccggcatcacctggggcggcgtgcgcgctaccggcgtcagcctgagcgccagctacgatcgcggcgaggcgaacggcgtctgggccgatctcagcgcgcaccagattaccggcaagaacgtggcggacaaccagcggcagcggttgatggccggttactactacaagctgatcaacgaagacaatcgccgcctgagcgtcgggctcaataccatgctgtggcactaccagaaggatttgagcggctattcgctggggcagggcggctattacagcccgcagcaatatctgtcgctgtcgctaccggtcaactaccgccagcgcaccgagaactggtcgtgggagctgggcggttcggtttcgctgtcccattcgaagaccgacagccagcgccgctatccgctgcaggggctgatcccggattcgttgcccgataagttcgccgtcgaggacggcagctcttcgagcggcgtcggttataccctgcgggcgatcgtcgaacgccgtctcagttcgcactggacgctcggcgccggcatcgatatccaacaggcgaaggactatacgccgagccacgcgttgatttatctgcgttattccctggccggctggcaaggggatctcgatttgccgccgcagccgctgacgccatacgccgacttcaagtagccgggaggggaagattcggagtgtcggacaccggggagttttgttaccctgtgtccgggtcgcgtttgtccgctttaggaaaagactgaaacccgcgattttcttggttttgcctgcggcatagccagataaaaacagccgatgatcgagtatactcagcccggttcgagggggcgggtgagagtcagccccctttttgtttcagcccgatttcacggagagcaggtttgcgggtcaggcgttcgttaacgattaagcagatggcgacagtgtccggcgtggcgctggtcacgatctgcatttttatcgtgatccagttattccactttgtgcagcagcgcagggatgactacgcccagcaactggagaatatcgctcattccgtgcgccagccgctggcggaagcggtgctgcgcatggacgtgccggaagccaaaaaggtgctgaacacgctgttgccggtcggcattctcagccgggcggatatcgtgttgccgaacgagtttcaggcgctgcacgccaatttcccgccggagcggccggtgccgacgctgatcgcccggctgtttgaactgcctatccaaatttccgtgccgctctattcgctggagcgggtgcccgccaaccagcagccgctggcctatctggtgctgcaggccgattcgttccgcatgtaccagtttatcctcagcattttgtcgaccatgctgtcgacctacctgctgctggcgctgatcctgtcggtggccatcacctggtgcatgaaccggctgatggtgcatccgctgcgcgcgatggccaaagagctggagaacatctcgcaggacgaagcgccctatcaccagctgatgctgccggcgctgcaccaggacgacgagctcggcctgctggtgcgcaattacaaccgcaatcaacagacgctggccaaggcgcatgccgatatgagccgcctgagcacccgccacccggtgaccgaactgccgaatcctgcattgctgaacgcgttgctggaacagcatatcgcctccagtctgcgccctgagcgttttaacctgctggtgatcggcatcgagacgctgcatgaagcgtctggcgtgatgagcccggcgatgcgtgaagcgctgctgctggcgctggcgaagaagctgcgcggctgcatcgacgaaaacggcgtgctggcacagctgagcaataccgaattcgccattctggccaagggcattgagcggccgttccacgccatgcagctggcgcggcgcatcatggcggagatcaatgcgccgttgacgctggaaggtctggcgctgcggcccaacgccagcatcggcatcgcgcactacctcaatcagggggagagcgcggaacagctgctgcgcagcgccacctcggcaatgatgtccgcgcaccgcgaaggaaaaaatcagatcctgttcttcgaacccagcctgacggaacgcacgcagaagcggctgacgcaggagagtgagatcctgcacggcatcgagcagcggcatttcacgctgttcctgcagccgcagatcgacatgcagtccaacgaggtgatcggcgccgaagcgctgctgcgttggcaacagtatgacggcagctataccctgccggccgacgttatcccgctcgcggaagagctgggcgtgatcgtgcctctcggcaactgggtgctggaagagtcttgccgtatcctggcggactggcagcaacgcggcattgcgctgccgctggcggttaacgtttccggtattcagatgcaggatgaagcgttcgtcccgcatctgaaaaacctgctggcgcagtatcggatcgatccgcgcaagctgctgctggagatcaccgagacggtacgcatcgacgatctcgatcgcgccctggcgctgctgcgcgagttgcacgacctggggctgtcgatcgcgctggacgacttcggcatgggctactccagcctggagtacctcaaccgcttgaaatccctgccgatcgatttgattaagatcgaccgcagtttcattcaggggctgccgggcgacgatgcgatggtgcgcatcgtcagttcgatctccgaagtgctggcgttgccggtgatggccgaaggcgtggaaaacgccgaacagcgtgactggctgctgcagcacggcattcgcagtgggcaaggattcctgttcgctcggccgctgccgcgcgaagcgttcgaagccgagttttgccgcgcggcgccgtgagcgtcgcgatacctttccggtacttttcctcgtccgaaaatcgccattctttatctacctcttttgcgttagtgcaaacaaaggcttacgcaattttcagctttgcaccccgactgacgcgtttcagctcttaaattcacatcaaccccacacggtgggtgcaacaaattatttccatgttgttaagtgggtgttattttccgcgcaagcgatgaacaggctggatttttagactgctgcctggtgcgtgtcttccccccataggatgttcatatgaaaacaacgatctttaagagcctctattttcaggtgctgacggcgatcacgctgggtatcctgcttggccatttctaccctgaccttggcgccgagatgaaacctctgggcgatggcttcgtcaaactgatcaagatgatcatcgcgccggtgatcttctgcaccgtggtgaccggcatcgccggcatggaaagcatgaaggcggtggggcgcaccggcgccatcgcgctgctgtattttgaaatcgtcagcaccattgcgctgattatcggcctggtgatcgtcaacctggtgcaaccgggcgccggcatgaacgtcgatcccggcacgctggacgccaaagcggtggcgatctacgccgagcaggcgcagcagcagggcatcattccgttcctgctggatatcatccccggcagcgtgatcggcgcgttcgccagcggcaacattcttcaggtgctgctgttcgcggtactgttcggcttcgccctgcatcgtctgggcgacaaagggcagctgatctacaacgtgatcgacagcttctcgcgggtgattttcggcatcatcaacatgatcatgcgcctggcgccgctgggggccttcggcgccatggcgtttaccatcggtaaatacggcgtcggcacgctggtgcaactcggccagctgatcgtgtgcttctatatcacctgcatcctgttcgtggtggtggtgttgggcagcatcgcccgcgccaacggcttcagcatcttcaaattcgtcaactacatcaaagaagagctgctgatcgtgctgggaacctcgtcgtccgaatccgcgctgccgcgcatgctggataaaatggagaagttgggctgcaagaaatcggtggtgggtctggtgatcccgaccggatactccttcaacctggatggcacctctatctacctgaccatggctgcggtgtttatcgctcaggcgaccaacacccacatggatatcatgcatcagattaccctgctggtggtgttgctgctctcctccaaaggggcggcgggcgtgaccggcagcggctttatcgttttggccgccaccatctccgccgtaggccacctgccgctggccggcctggcgctgatcctcggcatcgaccgctttatgtcggaagcccgcgcgctgaccaacctggtgggcaatggcgtggcgaccgtggtcgtggccaaatggtgtaatcagctggatgagaaacagctgaaagacaccctgaacaacaaaaataccggcgcggacaaaacgctgccttccgcctgatttcggcggtaaatcaccggccgcagccgcggccggtgagcttcttcccctgcctcgtaacgattttttgcattaaaaaccccgcaatctattatttttcactctaatgagtgacatccgcaaaggcgcgcggtctaacacgatggtacactttctgctttccgccccactgtgaaactcagggcgtatttttatgattccattgaatggaatacacgcatttgcataagaaattggatagtcattaagtaggggttcacatgcagggcaccagaattcatcttatagttggtgggctgctactggcggcagccagtagcagcgtgcaggctgaagcactacaacccgatcctgcctggcagcagggggcgctggccaacgggttttcatggcagattctcgatacgccgcagcggccaagcgaccgcgtggaactgcggctgatcgtcaataccggctctctggtggagtcttcgcagcagaccggtttcgcccatctgctgccgcggctggcgttggcgcgcagcgaaagctttaccgcgccgcagctgcgagccctgtggcaacagagcgtggataacgagcggccgctgccgccggcgatcatctcgtatgatttcaccatgtataacctcagcctgccgaacaaccggcccgacctgctgaaagaagcgctggcctggctggcggacaccaccggcaaactggcgatcgacgagcatacggtgcacgcggtgatgaattccagcatcaatccggtcggcactttcccgcccaatacccaagatgcctggtggcgttaccgcctgaaaggctcgacgctgctggcgcacgatccggcgcagccggcgaaacggccggtcaacctcgagcagctgaagaaattctatcagcagtggtataccccggacgccatgacgctgttcgtggtcggcaaggtcgacagccgcagcctgggcgagcagatcaacaaggcgttctcgccgctgcagggcaaacgtgaaaccccggccccgatgccgaccctgacgccgctgccgcagcagccggtgagcctgatcagcgagcaggtgaaacaggatacgctgtcgatcatgtgggattcgccgtggcacccgattcgcgattcgcagagcctgctccgttactggcgtggcgatctcgcccgcgaggcgctgttctggcatcttcagcagacgctggaaaaaagcgaccagaagagcctgcatctgggctttgactgccgcgtgcagtaccagcgtgggcagtgcgccatccatctggatacgccgaacaacaatctgaacggcagcctgggctttatcgcccgcgagctggccaacgtgcgtgataacggtctgtcgaaagaggaattcgatgcgctgctggcgcagaaaaacgatcagctgagcaagctgttcgccacctacgcccgcaccgacaccgatgtgctgatgagccagcgcctgcgttcgcagcagagcggggtggtggatatcgcgccggagctgtatcagaaactgcgccaggaattcctgtccagcctgacgctggagacgctgaatcaggcgctgaagctgcagctgtctcaggaggcgaccctggtgctgatgcagccgaaaggtgagccggaaatgagcatgaagcagctgcaggaaacctatgacggcatcatgatgccggcgccggcggtggtgacggaagaagccaaaccggccgacaccgcggtggctgcgccggtgacggacgccggcgcgcagtaattcgcagcagggggcgcaggccccctagttacggtacagcaccttgatgatgtggtaaccgaactgggttttgaccgggccgtaaggtttgagcagcgggatgctgaacaccgctttatcgaacgccggcaccatcgcgcccttgttgaattcgcccagcgagccgccgttgcgttttgacgggcagctcgaatatttgcgtgccagcgtgtcgaagctgacaccgcgcttcagcttggccagcagctcgttggccagcttttcattgtctaccagaatgtgcagggcgcacgccgtttttgccatggtattgcctttgtcgatgcgaaaattgcgctgattatacccgctaaatctcatcggcgctttctgctacaattcccttccacgttttacagttgagcaagccagcaccatgcgattaaaccccagccaacaacaagccgtcgaattcgttaccgggccctgcctggtgttggccggcgccggttccggcaagacgcgcgttatcaccaacaagatagcccacctgatccaccactgcggctatcaggcgcggcacatcgccgccgtgacctttaccaacaaggccgcacgcgagatgaaagagcgcgtgtcgcaaaccctggggcgcaaagaggcgcgcggactgatgatttccaccttccataccctggggctggagatcatcaagcgggaatacgtggcgttggggatgaagtccaacttctcgctgttcgacgatcaggatcagctggcgctattgaaagagctgaccgaaaagtggctggaaagcgacaaaacgctggtggcgcagctgatttcgaccatctccaactggaaaaacgacctgatcgatccccagcgggcggcagagttggcgcgctcggaacgcgacaagctgttcgcccactgctacggtctttaccacgcccatatgcgggcgtgcaatgtgctggacttcgatgacctgatcctgctgccgacgctgctgttgcaacgcaacgaagaggtgcgcgaacgctggcagcagcgcatccgctatctgctggtggatgagtatcaggataccaacaccagccaatacgagctggtgaagctgctggtgggcaaccgcgcgcgctttaccgtggtgggcgacgacgaccagtcgatctactcctggcgcggcgcgcggccgcagaacctggtgttgctgaaggaagatttcccggcgctgcaggtgatcaagctggagcaaaactaccgttccagcgagcgcattttgaaggcggccaacattctgatcgccaataacccacacgtgtttgaaaagcggctgttttctgagctggggtatggcgaagagctgaaggtagtgaccgccaacaatgaggatcacgaagccgagcgggtggtaggggagcttatcgcccaccacttcgtgaaaaagaccaattacggcgactatgcgatcctgtaccgcggcaatcaccagtcgcgggtgtttgaaaagatgctgatgcagaaccgtatcccgtacaagatttccggcggcacctcgttcttctcgcgccccgagatcaaggatctgctggcttacctgcgcgtgctgaccaacccggaagacgacagcgcctttctgcgcatcgtcaatacccccaagcgtgagatcggcccggcaacgctgcagaagcttggcgagtgggccaaccagcgcaacaaaagtttgttccatgccagcttcgatctggggctgagccagcacttgaccggacgcgggctggaatcgctgcagcgcttcacccattggctgggcggcatcgcccagcaggcggaacgtgagccagtggcggcggtgcgcgatctgatccgcggcgtggattatgagagctggctgtttgaaacctcgaccagcccgaaggccgccgaaatgcggatgaaaaacgtcaacacgctgttcggttggatgacggaaatgctggaaggcaacgatctggacgagccgatgacgctgacccaggtcgtgacgcgcttcaccctgcgtgacatgatggaacgcggcgaaagtgaagaggagctggatcaggtgcagctaatgacgctgcacgcctcaaaggggctggagttcccttacgtgttcctggtgggcatggaagaggggctgctgccgcaccagagcagcatcgacgaagacaatgtcgatgaagagcggcgtctggcctatgtagggatcacccgcgcgcaaaaagagctgattttcaccctgtgccgcgagcgccgtcagtacggcgagctggtgcggccggagccgagccggttcctgctggagctgccgcaggacgatttggcgtgggaaaccgaacgcaaagtggtgagcccgcaggagcggatgcagaaggggcagagccatctggccaatatccgcgcccagctggccaaggccaaaggcgggaattaaaaagaaagggcgcgattcgcgccctggtcatgtcaacgttgttcttccaaccgcagcgtccagtggacgtagctctgccagtggctttcctgctccagcgcctcggcgcgcagcggatgctgttccagccagcccggcggcaagatcaccgtcagttcatcgtcctgattggcgcgtaaccgcaccgccggcagcgtgtcgtcgcggcggcggctggcgaagatgatcgccaggcgcaaaatgcggcacaggcgctgcgcagtgcgcggcggcagggcgttttgctggttcaacagcgacaggtcgagggtgttgctctgattttgcagcagggtggccagcagttttttctgcgccggggtaaagccgggtaagtccaggtggcggatcaggtaggcggcgtgttgcggcgcctgcttgaaatcgacgctgaggccgagttcgtggatcaggctggcgctgtgcaacagctcgcgacatcgcgcatccagctgccactcgttggcgacctgctgggagaagttggcggcgagctggctgacgcgttcggcctgctcggtgtcgatcaggtagcggcgctgcaggttgcggatggtgcggatgcgaatatcctgctccaccggcagatgcagcatgccgtaaaccagaccttcacgcagcgccccgccggccagcatcatgctctcgatgcccagctcctggaagatggccaacaggatggacaggccgctcgggaacaccagcgcgcgctccagcgtcaacccttcgatctccagctcttccagcttgccgcactgaatggcgcgctgtttcagctggcgcagtttgggcagggtgatgcgctcatccatgccctgcgccaccatgatctcctgcagcgcttgcacggtgccggaagcgccgacgcagatctgccaaccttgttggcgcaattgcggtgcgatcggccgcaccatttcgcgcgcggcctgttcggcgcgctcgaagttttcttgcccaaggttgcgatcgctgaagtagcgttccagccaggtgacgcagcccatcgacaggctatacagctgcgttgcctgtgcgccggtgccggtgaccagttcggtgctgccgccgccgatgtcgacgaccagccgacgatccggcccgccggtggtgtgcgcgacgccgtgatagatcagccgtgcctcttcttcgccgctgatcacctgtaccgggcagccgaggatttgctcggcggcctgcaggaactcatcggcgttggacgccagacgcagcgtggcggtggcgacgacgcggatctgctcgcgtggtatgtcctgcaggcgttcggagaacagccgcaggcactgccagccgcgttgcatggcctcatgcgacaggtgattgttctgatccagcccggccgccaggcgcactttgcgcttgatccgcgccagagtctgaatgctgccggccacctcgcgcactaccaacatgtggaagctgttggagccgagatcgatggcagcataaagcgtgctggagctgagcatggcgatcagctcgaacgtttacggttgttgcgcggcgcgccgccgcgacgtggcgcggagttgcgacgtgggccgttgccgccgcgcggacgcgacaggcgcttcggcgccggcaaatcggtcagcagcgcatcgctgttgtacttgctcaccggaatgctgtggtcgatataggtctcgatcgccggcaggttgagcgcgtactcttcacacgccaggctgatggagtggccgctggcgcctgctcggccggtacggccgatgcggtgcacgtagtcttcgcagtcgtcaggcagatcgtagttgaagacgtgcgtgacggaagggatgtgcagaccgcgcgcggcgacgtcggtggcgaccagaatatcgagattgcctttggtgaagtcgtcgaggatgcgcaggcgttttttctgcgccacgtcaccggtcagcaggccgacgcggtgaccgtcggcggccaggtggccccagatgtcttcgcagcggtgcttggtgttggcgaagatgatggcgcgatccggccactcttcttcgatcagtgtctgcagcagacgcattttttcttcgttggacgggtagaacagctcttctttaatgcggtggccggttttctgttccggttccacttcaacatattcggcgttgttcatctgctcgaaggccagttcgcgtacgcgataggacagggtagcggagaacagcatgttcaggcgttgatcggccgcaggcatgcggcggaacagccaacggatgtctttgataaagccaagatcgtacatgcgatcggcttcatccagcacgacgacctgcatcgcgccgagatcgacatagttctgtttggtgtaatcgattaaacggccggtggtgccaatcagaatgtccacgccgctttccagcactttcagctgtttgtcgtagccgtcgccgccgtaggccaggcccagtttcaggccggtgctctgggagagcgcttccgcatcggagtggatttgcaccgccagttcacgcgtaggcgccatgatcaaggcgcgcggctgattggtctggcgatcctgtttcgccgggtgagtcagcaaatagtgaaaagtagacgccaaaaacgccagcgtctttccggtaccggtttgcgcctgacctgcaacgtcacgcccggagagcgtgagcggcaatgctaacgcctggatgggcgtgcaattgtgaaacccttttttctcaagggcttcaaggactaacgggtgcagggcgaagtcggaaaacttctgttcggtcaagtgtgttttgctcatagtgtggtagaatatcagctaactattgctttacgaaagcacatccgttgaaataaacgcggtgcaataaaatcaccttgagttggttaatgctacaccaacaaggtagacataatcctgtggagtagaacatgagcgataaaattattcacctgactgacagcagcttcgaagctgacgtgctgaaagcggaagggccgatcctggtcgatttctgggctgaatggtgtgggccgtgcaagatgattgctccgattctggatgagattgccgaagagttcgaaggcaaactgaccatcaccaagctgaatatcgatcagaacccggctaccgcgcctaagtacggtatccgtggcatccctacgctgttgctgttcaagaacggtgaagtggccgcgaccaaggttggcgcgttgtccaaaggtcagctcaaagatttcctgaacgcgaatctgtaatcgggcgggaagcccagtatcaggcgcctggcggtgatgttcaattcaccgctagacgcctgccaagaagcgtgttaagtttaaccacactgcatatagaacttgcccgaagttttaaatctaaagagtttgaatctaaagctatactctgtgtcgaaccactggcgttgaaagtaaactgaactcagcccgtgttttggcaatcaaacggttttgcaaaaatcatttttaaggtaccttcgatcttcaaccgtcaatgcgtgcgcccgatgtaagccatttcttaccgcgacggctctgcgcccggtgatcgaacgtccagtaaacaggcacgcatttcgctgccataccattcacgatacaagttcgagacataccccgagtttaagaacccaccactatgaatcttaccgaattaaagaatacgccggtttctgagctgattactctcggcgaaaatatggggctggaaaaccttgcccgtatgcgcaagcaggacattatcttctccattctgaagcaacatgcgaaaagcggagaagatatcttcggcgacggcgtgctcgagatattgcaggatggattcggtttcctccgctctggagacagttcctacctcgccggtcccgacgacatctacgtatcccctagccaaatccgccgcttcaacctccgcactggtgacaccatttccggtaagattcgtccgccaaaagaaggcgagcgctattttgccctgttgaaagtcaacgaagtcaactacgacaagccggaaaacgcccgcagcaagatcctgttcgagaacttgacgccgctgcacgccaattctcgtctgcggatggagcgcggcaacggctcgaccgaagacctgacggcgcgcgtactggatctggcggcgcctattggccgcggccagcgtggcctgatcgtggcaccgccgaaagccggtaaaaccatgctgctgcagaatattgcgcagagcatcgcctacaaccacccagactgcgtgctgatggtgctgctgatcgatgaacgtccggaagaagtgaccgagatgcagcgcctggtgaaaggcgaagtgatcgcctcgaccttcgacgagccggcttcgcgtcacgtgcaagtggccgaaatggtgatcgagaaggccaagcgcctggttgagcacaagaaagacgtgatcattctgctcgactccatcacccgtctggcgcgtgcctacaacaccgtggtaccggcctctggcaaggtgctgaccggtggtgtggacgccaacgccctgcatcgtccgaagcgtttcttcggtgcggcacgtaacgtggaagagggcggcagcctgaccatcatcgcgaccgcgctggttgataccggttcgaagatggatgaagtgatctacgaagaatttaaaggtaccggcaacatggaattgcatctggcgcgtaaaatcgccgagaaacgcgtattccctgcgatcgattacaaccgctccggtacccgtaaagaagagctgctcaccacttccgaagagctgcagaaaatgtggatcctgcgcaaaatcattcacccgatgggtgagattgacgcgatggagttcctcattaataagttggcgatgaccaaaaccaacgatgaattcttcgatatgatgaaacgctcataattcgttaaaaaattcgctgaacgccacgcctagtcgtggcgtttttcgcttttggcggatacgataagtagcagtaatggaaaagtaagttgtttcctcgacttattgagaattcatcttgtttgtcggtcggcccggtgccggtcggctttgctgctgtcgttttgtcagccgatgcgaagaaaataggcatgaatcaccgttgtcataggaaatgaccgaaaggtggcgggggtcgatggcacaagctattgcccgtggtaagctgccttatcttctacagagatctgttaactgtgaacttactcactatgagtactgaaattctatttgttttcctgttttctttggcttttctctttgttgcccgcaaggcggcaaaacgtattggtctggtagataaacccaattatcgcaaacgccatcaggggttgattccgctggtcggcggtatttccgtttatgccgggttgtgcttcgcgttttggatttccgaacaacctatcgcgcacgccaagctttatctcacctgcgccggcattctggtgtttgtgggcgcgctcgacgatcgtttcgatatcagcgttaaaatccgcgccctggtgcaggcgctggtcggcatcgccatgatggtgttcgccggtctgtatctgcgcagcttcggccatgtgctgggtgactgggagatgctgctggggccgttcggctatctggtgacgctgttcgcggtatgggcggcgatcaacgccttcaacatggtcgacggcattgatggcctgctgggtgggctgtcgtgcgtttccttcggggcgctgggcctgctgctgtacctgagcggccatcatgagctggcgttctggtgctttgcgatgatcgccaccatcgttccctatattttgctcaacctcggcatcctcggccgccgttataaggtgtttatgggggacgccggcagcaccctgatcggctttaccgccatttggctgctgctgcaaagctcgcagggtaaggcacactcgatcaacccggtgaccgcgctgtggatcatcgctattccgctgatggacatgatagcaatcatgtaccgtcgtttacgcaaggggatgagccccttctctcccgatcgtcaacatattcaccacctgatcatgcgcgccggctttacgccgcggcaggctttcgtgttgatcaccctggcggccgcattgctggcggcggtgggcgtgatcggcgaacgcctgacttttatccctgagtgggttatgttggcattatttttgcttgctttcttcctgtacggttactgcatcaagcgcgcctggcgggttgcgcggtacattaagcgtatcaagcgccggctgcggcgttcgagcgataacaagcaagtatcttaaccagaggctttttggctgtgatgaatccagaaacaacgtctgacaagcataccccggcggtggataacgaactcgatatccgcggcctgtgctgcaccctgtggcgcggcaaaccgtggattatcggcattgcggtgctgttcgcggcggtcgcgctgatcgtttcttacctggttaagcaagagtggagcgcgaccgcaatcaccgacaaacccacggtgaatgcgctgggtggttactattcccagcagcagttcctgcgcaatctggacgtgcgcacgctgccggcgatggccggcgatcagccgagcatcgcggatgaagcgtacaatgagttcatcatgcagctggcggcttacgacacgcgtcgcgatttctggctgcagagcgattactacaaacagcgtcaggaaggggatgcccgcgccgatgcggcattgctcgacgagttgatcaataacatcctgttcacgccgcgcgacgacaaaaaagtcccgaacgacggcgtgaagctgacggcggaaaccgccgcagacgccaaccgcctgctgcgccaatatgtggccttcgccagccaccgcgctgccctgcatctgaacgaagagattcagggggcgtgggccgctcgcactacttcgatgaaggcacaggtcaagcgccaggaagcggtggcggagtcggtttacaagcgcgagctgaacaccacgcagcaggcgttgaaaatcgccgaaagccaggggatcagccgcacgcaaaccgacaccccggcagaacagttgccggattcggatctgttcctgctgggccggccaatgctgcaggcgcgtctggaaggcctgcaggcctccggcccgacctacgatctggattacgatcagaatcgcgcaatgttggcgacgctgaacgttggcccgacgttggatgagaagttccagacctatcgttatttgcgcacgccggaagagccggtaaaacgcgacagcccgcgccgggtattctggctgattctgtggggcgcgatgggcgctttggttggcgcgggtgttgccctggcgcgtcggccgcgtagttaaaaaataatataataatctgatgcagggcgcgtgagcgccccattcgcaggcggggcctgcgattaaccgaccaaaagagattcgctgtgaaagtgttgactgttttcggcaccagacctgaagccattaaaatggcaccgctggtacatgcactggcccaggatgaggcctttgaagcaagagtctgcgtaacggcacagcatcgtgagatgttggatcaggtattgcggttgttcgagatcacgccggattacgacctgaacatcatgaaacccggccaggggctaacggaaatcacctgtcgcatcctggaagggctgaaaggggtgctggaagacttcaaaccggacgtggtgctggtgcacggcgataccaccaccacgctggcgaccagtctggcagcgttctatcaacgcatccccgtcgggcatgtcgaggccgggctgcgtaccggcaatctgtattctccctggccggaagaggccaaccgaaaactgaccggccatctggcgatgtaccacttcgcgccgaccgagaactcgcgccaaaacctgctgcgcgagctgctgccggacaaccgtatttttgtgaccggcaatacggtgatcgacgcgctgttctgggtgcgcgatcgcgtgatgagcgatgctgcgctgcgcgccagcctggcgcagcgttacccgttcctcgatgccgacaaaaaactgattctggtcaccggccatcgccgggaaagttttggcggcggttttgagcggatttgcagtgcgctggcggagatcgcccgcagccacccggaagtgcaggtggtgtacccggtgcatctcaatccgaatgtcagcgagccggtgaatcgcattttgaaaggcatcgacaacgtcatgctgatcgagccgcaggattatttgccgtttgtctatttgatgacccacgcttacatgatcctgaccgactccggcggcattcaggaagaggcgccctcgttaggcaagccggtgctggtgatgcgcgacaccaccgagcgcccggaagcggtagatgcgggcacggtgcgcctggtcggcaccgatgtggccaaaattgttgaagcggtgacccggctgttgacggacgaaagcgaatatcacgcgatgagccgggcgcataacccatacggcgacgggcatgcctgtcagcgtatcctcgaagctttaaagaatcatcaggtgacactatgagttttgacactatttcggttatcggcctgggttatatcggcttgccaacggcggcggcgtttgcttcccgcaagaaaaaagtggtgggcgtagatgttaaccaacatgcggtagataccattaaccgcggcgcgatccatatcgtcgagccggatctggacaaagtggtcaaggacgccgtcgacggcggtttcctgcgggcggtgaccaaaccgctggcggccgatgcgttcctgatcgcggtacctacgccgttcaagggcgatcacgagccggatctggcttatgtcgaagcagcggcgaaatcgctggcgccggtgctgaaaaaaggcgatctggtgatcctggagtccacctcgccggtgggcgccactgaacaaatggcggactggttggcgcaggcgcgcagcgatctcagcttcccgcagcaagcgggcgaagcggcggacgtgaatatcgcctactgtccggagcgcgtgttgccggggcaggtgatggtagagctgattcaaaacgaccgagtgatcggcggcatgacgccgaagtgctcggaacgagccagcgcgctgtacaagattttcctcgagggggaatgcgtagtcaccaactcacgcactgccgagatgtgcaagctgacggaaaacagcttccgcgacgtgaatatcgcctttgccaacgaactgtcgttgatttgcgccgaacaggggatcaacgtctgggaactgatccgcctggcgaaccgccatccgcgggtgaatattctgcagccggggccgggcgtaggcggtcactgcatcgccgtcgatccgtggtttatcgtggcgcaaaacccgcagcaggcgcgtttgattcacaccgcgcgcctggtgaacgacggcaaaccgctgtgggtggtcgaccgggtgaaagcggcggtggccgattgcctggccgccaccgacaagcgcgcgtccgaggtgaaaatcgcctgcttcggcctggccttcaaaccgaatatcgacgatttgcgtgaaagtccggcggtggaagtggcgcacctgatcgccgaatggcacgtcggcgaaacgctggcggtggaaccgaacgtcgaacagttgccgaagtcgctggcgggccacgtgacgttgacgccaatcgctgaggcgttgcagcaggccgatgtgattgtgatgttggtcgatcaccaacagttcaaggccatccggccggaagagatcaagcaaagctgggtggtggataccaagggagtctggcgttgaagcgtatcttagtcaccggcggcgccggtttcattggctccgcagtggtgcggcacatcatcgaagccaccggcgacagcgtggtggtagtggataagctgacctatgccggtaacctcgagtcgctggcggtggtggccgacagcgagcgctatgctttcgagcaggtcgacatctgcgatcgtgccgagctggaccgggtatttgcacgctatcagccggacgtggtgatgcacctggcggcggaaagccacgtcgatcgttctatcgacggcccggcggcgtttatcgagaccaacgtggttggcacttacacgatgctggaagcggcgcgccattactggcagccgttggcggcggagaagaagcagtctttccgcttccatcatatctccaccgacgaagtgtacggcgacctgcacggcaccgacgatctgttcaccgaaaccacgccgtatgcgccgagcagtccgtattccgcctccaaggcatcgagcgatcatctggtgcgtgcctggttgcgcacctacggtttgccgaccctcgtgaccaactgttcgaacaactacggcccttatcacttcccggagaagttgattccgttggtgatcctgaatgcggtagccggcaaaccgctgccggtatacggcaacggcgcgcaggtgcgtgactggttgtatgttgaagatcacgcgcgcgcgctctatcaggtcgtgaccgaaggcgtggtaggcgaaacttacaatattggtggccataacgagcgcaagaatatcgaagtggtgcagaccatttgcgatctgctggaagaattggcgccaaataaaccgcagggcgtgacgaactaccgcgatctgatcacttacgtgaaggatcgcccaggccacgatatgcgttacgccatcgacgccggcaaaatcgatcgcgagttgggctggcggccgcaggaaacgtttgaaagcggcattcgcaagacggtcgcctggtatttggctaacgaaacctggtggcgccgggtgcaagacggttcttatgccggtgagcgtttggggttgtcagattaatttaacgccgcgtcgctttgcggcggtgcggcgggttttggagtaagtatgaaaggtattgtgctggctggcggttccggtacgcgtctgcatccgatcacgcgcggcgtgtccaagcaactgctgccgatttatgacaagccgatgatctattacccgctgtcggtactgatgttggcagggatcaaagacattctgattatctccacgccggaagatctgccttctttcaagcgtttgttgggcagcggcgaagcgtttggcatcaatctcagctatgccgagcagcctagccccgatggcctggctcaggcatttctgattggcgaagaattcttggccggcgagccgagctgcctggtgttgggcgataatatttactttggtcaggggttcagtcccaagctgagaagcgttgcggcgcgcaccgccggtgccacggtatttggctatcaggtgatggatcccgagcgtttcggcgtggtggagtttgacgaccacttccgcgcgctgtcgatcgaagaaaagccggttaaaccgaagtccaattgggcggtgaccggattatatttttatgatgctcaggtggtggagttcgccaagcagatcaagccgtcagctcggggagaattggagatcaccagcatcaaccagatgtatctggagcgtggcgagctgaccgtcgagctgctggggcgcggttttgcctggctggacaccgggactcacgacagcctgctggaagccagtagcttcgtgcagacggtagagaaacgtcagggctttaaaatcgcctgtcttgaagagatcgcctggcgcaatggctggctggatgatgagggcgtgaaacgcgcggctcagacgctggccaaaacaggttacggcaaatacttactggatttattgcatgcacgtccacgccagtattgaaccgctgaattgggagagcgacttcttccaattgaagagcgccaagttgcatttcgacgactctgcggcccccgtgagcaacgctgatttggatgcttatgcgttggtgcaggctaaaatccccgcttaccgattggagtgggccgatgcactgtcggcgctgggcttccggctggtcgaaggcgaagtggatctggccgtgaacattgcaactggacgcgagacggtcgataccgctgcggccggggtgcgcatggccgtgcccgaggacatcccgtcgttgcgggctgccgccggtgacgtgttcgccgccagccgatttcgcgcaccgtggtacgagcgcaccgatagcgggcgattctatgcggcctggatcgaaaaagcggtgctgggcaccttcgatcatcaatgcttgctggtattgggtaaccaggggcaacctgaaggctttgtcagcctgcgcgacattggcggccaggaaatgcgtatcggcttgctggcggcctaccccggcgcatcaggccggggcattggttccagactgatggcgacggcgctggccgaatgtcggcggcaggggatgcaacgcctgcgggttgcgacccaggtaggcaatatcgccgcattacgactctatcaacgacagggtgccgtgattgaaagcaccgcgtactggttatacagaggtagacatgattccatttaacgctccaccggttgttggcactgaactggaatatatgcaggctgcgatgagcagcggcaagttgtgcggcgacggcggttttacccgtcgctgccagcagtggatggaacagcgtttcggcagcgcgaaagtgctgttgacgccttcctgcaccgcgtcgttggaaatggccgccatcctgctggatatccagccgggtgacgaagtgatcatgccgagctttaccttcgtttccaccgccaacgcctttgtgctgcgcggtgccaaagtggtgttcgtcgacctgcgtccggacaccatgaacatcgacgaaaccaaaatcgaagcggcgatcaccgataaaacccgcgcgattgtaccggtgcactatgccggcgttgcctgtgagatggataccatcatggcgctggcgaagaaatataacctcttcgtggtggaagacgccgcgcagggcgtgatgtcgacctacaaaggcaaggcattgggcaccatcggccatatcggctgcttcagcttccatgaaaccaaaaactacaccgccggcggcgaaggcggcgcgacgctggtgaacgatcctgccctgatcgatcgggctgaagtcatccgcgagaagggcaccaaccgcagtcagttcttccgtggccaggtcgacaaatatacctggcgcgacatcggttccagctatctgatgtctgacctgcaggccgcctacctgtggggccagctggaagtggcggaacgcatcaaccagcgccgtttggctctgtggcagaattactacgacagcttcctgccgttggcgcaggccggccgtatcgagttgccgactgtgccggcggactgcgagcacaatgcgcacatgttctatatcaagctgcgtgatatcgacgatcgcaccgcctttatcgactacctgaaggaagctgagatcatgacggtgtttcactatatcccgctgcatgcgtgcccggccggcgaacagtttggccgctttgccggtgaagatcgctataccagccaggaaagcgcgcgcctggtgcgtttgccgctgttctacaatatgtccgatgctaatcaacgtacggtaatcaataccatcctgagcttcttcgcctgatatgtcgttggcaaaagcgtcgatatggaccgccggctccacgctgatcaagattggcgtggggctgttggtggtgaaactgctggcggtggcgtttggccccagcggcgtggggcaggcgggtaactttcgccagttgatcaccgtgctgggcgtgctgtccggcgcgggcatttttaacggcatcaccaaatacgtggcggagtaccaccaggactcgcagcgtctgcgtctggcggtcggcaccgcgtcgagcatcgtgctgggcttttcgaccttgctggcgctggtgtttttgttcgccgccgagccgatcagcatcgggctgttcgggcatgccgattacgtcggcgtggtgcgcgccgtcgccttcattcagatgggcatcgcctacgccaacctgttcatggcggtgctgaaaggttatcgcgacgcgatgggcaacgcgctggcggtgatcggcggcagcctgatcggcgtgatggcttattatctgtgcttcaagctggggggctatgaaggcgcgctggcagggctggcgttggtgccggcgttggtggtgctgccggccgggctgatgctgtggcggcgcaaaacgttgccgctgcgctacctggcgccgcgctgggacaaaggggtggccggcaacctcggcaaattcaccctcatggcgttgatcacctcggtgacgctgccggtggcctacgtgatgatgcgtaacctgttggccgcgcattacggttgggatgaggtggggatctggcaaggcgtcagcagcatttccgatgcctatctgcagtttatcaccgcctcgtttaccgtctatctgctgccgacgctgtcgcggttgacggacaagggcgccatctcgcgggagatcgtgcgctcgctgaaattcgtgctgccggcggtagcggcggcgagctttacggtgtggttgctgcgtgatttcgccatctggctgttgttctcggacaagttcgtcgccatgcgcgatctgtttgcctggcaactggtgggcgacgtgctgaaagtcggggcctatgtgttcggctatttggtgatcgccaaagcgtcgctgcgcttttatatcctgacggaagtcagccagtttctgctgctgacgctgttctcgcactggctgatcccgctgcgcggcgcgctgggggcggctcaggcctatatggcaacctacatcgtgtatttcgcgctctgtagctgcgtgtttcttatttatcgtagacgagtatgaccatactgattcacgttctgggatccgatatcccgcatcataaccagacggtgctacgcttcttcaacgacgtgttggcgccgcgtctgccggctgagcagacgcggcattttatggtggcggccaaggatgtggcggcactgggagatttccccgccctgaacattgagccctacgcggacaagaaaagcctggcggcggcggtcatcgcgcgcgcccaagccgatcgcgatacgcgtttcttcctgcacggccagttcaacccggggctgtggctggcgctgctgagcggcaagatcaaggcgcgtcaggtcagttggcatatttggggcgccgatctgtatgaggacgccaccagttggaaattccggttgttctatctgctgcgccgcattgcgcaggggcgggtagggaatgtgtttgccactcgcggcgacgtgattcactaccagcagcgccatgcgcgggtgccggcctcgctgctgtatttccctacccgcatggatccggcgctgaccgacgttcacgtcgagaaaaacctggccgggccgatgacgattctggtgggcaactccggcgatcgcagcaatcggcatatcgaagcgctgcaggcgattcatcagcagttcggcgccgacgtgcgcgtgatcctgccgatgggttatccggccaacaacgatgcttacatcgagcaggtgcgcgccgccgggttgccgctgttcggcgagaaaaacctgcagctgctcacgcagcaggtggcattcgaggactacctcaatattctgcgcgcctgcgatctgggctatttcattttcaatcgccagcaggggattggcaccctgtgcctgctgattcagttcggcgtgccttttgtgctcagccggcaaaacccgttctggcaggatttggcggaacagcacctgccggtgctgttctacggcgattcgctggacgaggcggtggtgcgcgaagcgcagcgtcagctggcggcggtggataaacaggcgatcgccttcttcaatccgaactatgttgacggctggcagcaggccctggcgctggcggcgggagagcactcatgacgttggcgcaattcggcggcctgtttgtcgtctatctggtcagcctgacgtttatcctgacgctgacctaccaggagtttcggcgcgtgcgctttaacttcaacgtcttcttctcgctgctgtatttgctgacgttctatttcggcttcccgttaacctgcctgctggtgtttcagtttgacgtcgaggtggtgccggtggagtttctgctgtatgccctgctgtcggcgacggcgttttacgccatctattacgtcacttacaagacccggctgcgcaagcgccgcactcagccgcgcgcggcgctgtttaccatgaaccgggtagagactcatatgacctgggtgctgctggcgctggtggcgatcggtaccgttgggatcttcttcatgcagaacggcttcctgctgttcaagctcaattcctacagtcagatcttctccagcgacgtgtccggcgtggcgctcaagcggttcttctacttcttcattccggcgatgctggtggtctatttcctgcggcaggatctgcgcgcctggtttttgttcctggtggcgacggtggcgttcggtattctgacctacgtgatcgtcggcggcacccgtgccaacatcattatcgctttcgcgctgttcttgtttatcggcatcgtgcgcggctggatcacgctgtggatgctggcggcggcgggcatattcggcgtggtcggcatgttctggctggcgttgaagcgctatagcctggacgtcagcggcgcggaagcgttttataccttcctctatctgacccgagacaccttctcgccgtgggaaaacctggcgctgctgctgcaaaattacgacaagatcgatttccagggcctggcgccgatcttgcgtgatttctacgtctttatcccaacctggctatggccgggccggccggacgtggtgctgaactcggccaactatttcacctgggaagtgctgaacaaccactccgggctggcgatatccccgacgctgatcggttcgctggtggtgatgggcggcgcgctgttcatcccgctcggcgcgattctggtgggcatgatcatcaagtggttcgactggctgtatgagctgggcaaaacagagccgaaccgctataaggcggctatcctgcaaggattctgcttcggcgcggtgttcaacatgattgtattggcgcgcgaaggggtggactcattcgtttcgcgcgtggtgttcttctgcattattttcggcgcctgtctggtgctggcgaagttgctgtattggctgttcgataccgccgggctgatcaaggccagagtgacgcgcgcccgcgcgctggcctcttccccacgggcggacggtcttttgtaagggtaatgacgacgatggaaacaaagatttcggtgccgcagtatgagctgcgcggtttcagcctgtggggctttcgcgatatggcgcactgtatggattttctgttcgacggcggccgggtcaaacagggcacgctggtggcgatgaatgcggaaaagatcctgaaggcggaagaggacccggcgctgcatgcgttgctggatgaagcggagtacaagtacgccgacggcatcagcatggtgcgctcgattcgccgcaaatacccggcggcggatgtgtcgcgcgtcgcgggcgccgatctgtgggaagcgttgatgcagcgcgccggccgcgaaggcacgccggtcttcttggtcggcggcaagccggaagtcttggcggaaaccgagcagaagctgcgcagccagtggaatgtcaacctggtgggcagccaggacggctatttcaaaccggatcagcgagaggcgttgttcgagcgtattcgcgccagcggcgccgctatcgtgacggtggcgatgggatcgccgaagcaggagatcctgatgcgcgactgccgcaaggtgcatccgcaggcgctgtatatgggcgtgggcggcacctacgacgtttttaccggccatgtgaagcgtgcgcccaaggtgtggcagaaccttggtctggaatggctctaccgcctgctcagccaacccagccgcattggccggcagttgaagctgttgaagtttgtcggctactactacagcggcaagatgtaacctctcatccggggtggaaagtgctgttccgctccggactgctgtaccaataatctgcttttgcctatttctcccgcatatctataacccccagccctaaacgtcgccgcatttattccataaagttttaaattgcggtttgcttatagcggcgaaatgcgaaacgataccgcccggaaattatccctggccgctgaagcctgatgcgacagcgctgaacgatgttcttctcacggtaacttcgctccgactacccgttgatgccaacccgaacggcaggggatgatttattcttttaataatgacaataacgaccggcagcggccggcaggcaaacacaacccgagaaaaattattgaggatttatggcacacaaagagaaaccgcaagggctacaccgaggccttgaggcccggcacatcgagcttatcgctctcgggggcaccattggtgtcggcctgtttatgggatcggccagtacgctgaagtgggcggggccgtcggtactgctggcttacatcatcgccgggctgttcgtgttcttcattatgcgttcgatgggggagatgctgttccttgagccggtcgccgggtcgttcgccgtttacgcgcataaatacatgaatccctacttcggttatctgaccgcctggggctactggtttatgtggatcgccgtcggcatttctgagatcaccgccatcggggtgtatgtgcagttctggttcccggaaataccgcagtgggtgccggcgctgatcgccgtggcgatggtggcgctggccaacctggcggcggtgcgcctgtatggggagctggagttctggttcgccatgatcaaggtcaccactatcatcgtgatgattctggtggggctgggggtgatcttcttcggcttcggcaacggcggtgaacctatcggtttcgccaatttgacggcgcacggcggtttctttgccggcggctggaaaggcttcctgtttgcgctgtgcatcgtggtagcgtcctatcagggggttgagctggtgggcatcaccgccggggaagccaagaacccgcaggtgacgctgaaacgcgcgatcaacaatatcctgtggcgcatcctgatcttctatgtcggcgcgatcttcgtcatcgtcaccattttcccctggaacggcatcggcactaccggcagcccgttcgtgctgaccttcgccaagatcggcatcgttgccgccgccggcatcatcaacttcgtggttttgaccgccgcgctctccggctgcaacagcggcatgtacagcggcggccgtatgctgtacgccctagccaagaatcgccaactgccggcggcgttgaccaagctttccgccagcggcgtgccggtgaattgcatcgccgtcaccatcggctgcctgctggtgggatctgcgctgaactacattatcccgaatccggagcaggtgttcgtctatgtctacagcgccagcgtgctgccgggcatggtgccgtggttcgtggtgctgataagccagctctatttccgccgcgcccataaggaagcgatcaaaaaccacagctttaagtcgatcatgttcccgtatgtgaactatctgaccatcgcttttctggtttgcgtgctggtcggcatgggaatcaacccggatacgcggatttccctgctggtcggggcgattttcttagcgggcgtcagcctgtgctacttcgctttcggcatgcataagaaacatcatccggctgaaaatcgggtagaaacacggcaataaacggtgaaaagggactacggagtgcgctttcccgcgcaggagtgagcaaagcgtaatcaaacgcaacatttctgcgaaaaagcactagacaggattggcgtaaatccgtagtatcccctcccgcaacggcgctacgcgcccgtagctcagctggatagagcgctgccctccggaggcagaggtctcaggttcgaatcctgtcgggcgcgccattaagtttgtgcgcaggagctgcggtggtaatattaccgcgtgagtaagaagaagtagtaatggtggctatagctcagttggtagagccctggattgtgattccagttgtcgtgggttcgagtcccattagccaccccacttcctgatgaagtgaagatttagcagtattttgtgacagtgcgaaggtggcggaattggtagacgcgctagcttcaggtgttagtgttcttacggacgtgagggttcaagtccctctcttcgcaccacgcaaaatatctgataaatataagatttatatggacaacggtctgataaatcgggtagtatgagcaacacaaatcggcgagtagcgcagcttggtagcgcaactggtttgggaccagtgggtcggaggttcgaatcctctctcgccgaccacattcgaaaaacctgcttttttaaagcaggttttttttcgcctgcagtttatgaggatgagtacctccgcaggaggagcctcgcgaagcgagacaacgttgctttagcaacggcccgcagggcgcgtatccagaatgcgcgtaatctttctctctctgaccattttcaaagaaaccgacgtaagtcggtttttttacgtccgccgtttatgagggtaagtccttcccgctgcaacgaaacgcatagcgaccaacccgtgcagcattgcacgggtttttgcgtatttgaacattggcattttgtctcaaccggcacgtatgtaggttttcagcgacaatgtggttcgaagttgtcgccagtttgagacaaataatccattgattttaaaaattaaaagtggctttggcttaagtcgtcgttttgcggcgacagcatcagatcggccgtgggtaaagaacgacaggggacggcatgctgagataaagtgaggggtaaataaaaattcaatattttcaataaattaaatactattttttatggcgaatttcctggatctaaaagttggcacgtcaaatgcaatacctatagcgtagatgctcattccacctcttatgttcgccttaggcttcataaaccctgggaatgacgcagagccgatttagggtgcctatcgcccacgagaacgatgactaacccgtcatcacgctcagggcaaaacgttgagtgaggcaccgcccctgttgtcctagacctgattgcttctttatacacttgccatacggcaagtgtttttttttgcgccacagaaaaccctgggcaaaaaaagcgcggcatcggagccgcgcttttctcacttgggcagggcgttattcgccgccgttctgtttcagcgtcaacatcagtccctcacgtcgcatctgcgccgcttcatccgaacgatgcagtttttccagcgtatcggccaaccaggcgtagtcgtaagcatccgggcgctgtttcaacgcttcgcggaaggcgtcggccgcttgctgccattcgccgtgcttcatcagcagttgccccagcgtgctgttcagcagcggcgtcgcgccgtgttgcttcatctgctgacgcagcgctttctcaagctgctcggggttgccggacttcagccgcggcagcaacagcaccaggcgctcgtcatattggcgcttcaggctatcgagcacaatctcctgcgccagttcgtggtcgttgcattcgatcaggtgctccaccatcgcgatttgcagcggcacttcgtgacgcgtcttgcggctctgatctttccaccagcgcttcaggccttcgctgccttcgtccgccatcgcctgattcatcagcccgatgtaagcctgttgctgcaacgcctgcagctgctcttcactgtgcagctcgattttacgcatcgacggcagcacttccagcagcgacgcgtaggcgccggtgcgcagataggcttgttccgccaggcgcaacacttccggatggcgcggcgcctggttcagcaggcgatcgacgccgtggcgcgcggcatggttctcgccctgcgccagctggatgcgaacccgggtgatatccaccggcagctgatcggtatcggcggcttcagcggcgcgctccagatattggttggtacggaagtcatcgccgcgttgctgtgcggcctcggcggccagcaggtagttcaccaccggttgctcagcgtgatcggcgttgcgcgtcatcagcttttcaacctgtttgtagtcgccttccgccagtttgatcagcgcggctttggtttgctggcgcgcgcgggtgcgcttgcggccgataaaccagccgcgcgtgcgggcgccggtacggaagatgcggcgcaggatccactcgatcgccagcagcaccacgaacagcagcaccagcatgatcaccaggccggtgacactggtttcaatattgtagttatcggtctggatcagcacatagccctgatgcccggccaacatcggcccgagcaccacgctggcgatcaccaccaggaacagaaatagcacgcgtaacatggcttaaccctcctggtgagcggcaggggactgggtcatcaggttgcgcacccgggtctgcatcactttttccagcagcggctggctcttcagctgatccggcacatccatcgagatcgactgttggctcaggttgtccagttcttccaggaaggccttggtcgccgggtcggtggtgtcgaaataggcgcgcacccaggtggagacggtttccagcgactgcttgtaggtctcgttctgatggcgcgggatggcctgtgcggccaccagcaggcgcgaacggatgttctcgcgcaggtagatgtcctggttcggcgccagcagcggttcggcgctggtgtcgcggcggcggatggtgatgaagtcggccatgaaattgcgccagctcttggccaggttctgccgccattcgccgatcgagccggagagctcgctgctgttttgatccatcggcgcttcgtcggtgtcgttgtccgccaggcgcaggttatccacctgattggacagctgattgaccttgaggataatgccgtcgtaatcgacctgggtcagcgtggaaagcgtgctgatgtcttcggtaatggcgcggcgcacgtcgagcaggctcggatcgttcatgtccgccaggctggcgtcggcgcttttcagcagcgcggcggcgctggtcacgtcctgatcgctccacagcttgcggccggccattttcaccaggaaatcggcctgcgccagcagccaggttttggcgtcgctgccggagatggtcgccactttttcctgcagctcgctcagttggcgcgccagattcgcctgctcgcgatcggcggcgtccagggttttaccctgctgttgcagcaggccttccagcgcgtttctttcctgctgctggctctgcttcacgccttcgagctgctgctgcagtgcctgattggcggcgatcagctgttgcgcctgcttgtgcgtgtggtaatagccgcccgcgccgagggcgatgaccagcacgatagcgatcgcgccgagcaccgggccggtgttcttgcctttgcggctggcagcggctggctgctgggagctctcaaccgcggtggttggctcttcaaccggggcggatggggtattttgttccgtcatagtggcacatcccatagtcagattattgtagcgcgcggatcagcgcgtcattatcggcgttgtcagctacccgaatcgtacgccagcccaagtcccgggcgagggtagccaggcgttcgctcactactaccaggcggcaacgcagcagccatgaagaacgatagtaatcaggaactaaagtatagagctgttgtaacatttcaccgctggtcaccaccagcgtatccacaccggcgcgctgccagtgggcgctttgctcgctgccgtcatagtgcaccgggctgcgttgataacattcataatagctgacgtcggcgccgcgctcgctcagcgtcgaccccaacagttcgcggccgccgttgccgcgtaaaatcagcgcgcgtttgcccgccagcttttgcagcgccggcagcagcagcagcgtttcgctgatctcgcgttcgcgcgggtactccaccggcaaactgctgatgcggtgcagcgccagcccggtggtgcgaccgatggcgtaataagtcaggtgcgcgggccagctcagcccggcgcggccgataaccgaatcggcataactcaccgaatgctgcgacagcacgaacaccagatcgccggcgctaagctgctgcaacgcctgcggcagcttcggcagatcgccgccgggggcgaagtcgatcagcggtgcatgataggcaacccggccgagcgcgcgcagccggctcaccagcagctctcccgaaggcgatgggcgggttaccagaatggtcatgccggcggatttccctgataaacttcgcgcaggatctcgcgcgcgccgcgcgccagcagctcttccgccagctcaacgcccatccgttcggcctcggcggccgggccgcggcgttcgccgcgcaccatctggctgccgtccggcgcgccgaccagcgcgcgcagccacaggctgtcgccatccagttcggcatagctgccgatcggtacctggcagccgccttccaggcgggtgttcatcgcccgttcggcgcgcacgcgggtttcggtggccgcatggttcagcggcgccagcagcgcgcgggtgacgctgtcgtcgagacggcattcaatgccgaccgcaccctggccgaccgccggcagacactcttcggcgctcagcgggctgcggatgcgttgctccagacctaaacgcttcaggccggccaccgccaggataatcgcgtcgtagtcgccgttgtccagcttggccaggcgagtgccgacgttgccgcgcaggtcgcgcacgatcagatccgggcggcgttcacgcagctggcactggcggcgtaggctggaggtgccgaccacgctgccctgcggcagctgatcgagcgaggcgaaacgattggaaacaaaagcgtcgcgcggatcttcgcgttcgcaaatggtggtcaaaccgagcccggcagggaaatcgaccggcacgtctttcatcgaatgcacggcgatgtcggcgcggccttccagcagcgccagctcgagttctttaacaaacaggcctttaccgccgactttcgccaacggcgtatccagaataacgtcgccgcgggtgaccatcggcaccaactcgacctgcaggccgggatggcaggccatcagacgttgctgcacataatgtgcttgccaaagagcaagcgggctttgtcgggtggcaattcgaataattttgtctaacatgcttgttaccgtttttatatttcgccatccatcctaccactgagagccaatactgtcagtgcaagaagccggaggcggaaaaaggacaacggaatcaaagggacgtgtgatgtgctttggggcagttaacactgcgggtaaatcgtttagggaagcgctacaataattgtgaagcgttacctcctttacggtcaatcagcaaggtgttaaattgatcacgtttccagcaataagtcgccaaatattcttcttacactaacggcgcttatggaatacgggtttttttctaaacaccgggataatcaggcgagacgtcttgtacctctacatcgagacattgaagcagagactggatgcgatcaatcagctacgcgtcgatcgcgccctggcggctatgaagcccgcgtttcaacgggtatacagtctgctgcccaccttactgcaccaccaccacccgctgatgccgggttacctgaacggtaacgttccccacggcatttgcctctacacgcctgatgaaactcaacaagattacctgaacgatttagaagacaaatggggcagcccgtttgacaaaccggccagcggcgagctgccgatcaccggcgtctattcgatgggcagcacctcgtctatcggccaaagctgcagctcggatctcgatatctgggtctgccaccagtcctggctggacaacgaagaacgcacccgcctgcagcaaaaatgcagcctgcttgagaagtgggccgcctcgatgggggtggaagtcagcttcttcctgatcgacgaaaaccgtttccgccataatgaaagcggcagcctgggcggcgaagactgcggctcgacgcagcacatcctgttgctggacgagttctaccgcaccgcggtgcgcctggccggcaaacgcatcctgtggaacatggtgccgggcgaagaagaagcgcactacgatgaatacgtgctgtcgctgtacgcgcagggcgcgctgacgccgaacgagtggctggatctcggcggcctgagttcgctgtcggcggaagagtacttcggcgccagcctgtggcagctgtacaagagcatcgattcgccttacaaggcggtgctgaagaccctgctgctggaagcctattcctgggaataccccaatacccagctgctggcgacggacatcaaacatcgcctgcatcagggcgagatcgtcagcttcgggctcgacgcctactgcatgatgctcgagcgcgtgacccgctatctgaccgacatcaacgacaccacccgcctcgatctggcccgccgctgtttctacctgaaagtgtgtgaaaagctgtcgctggccaaggcctgcgtcggctggcggcgcgagatcctcagccaactggtcagcgagtggggctggagcgacgagcgtctggcgatgctggacaaccgcgccaactggaagatcgagcgggtgcgcgaagcgcataacgagttgctcgatgcgatgatgcagagctaccgcaacctgatccgtttcgcccgccgcaataacctcagcgtcagcgccagcccgcaggatatcggcgtgctgacccgcaaactgtatgcggcgttcgaagcgctgcccggcaaggtgacgctggtgaacccgcagatttcgccggacctgtcggaaaacgatttaacctttattcatgtgccggttggccgcgccaaccgcaccggctggtacctgtacaatcaggcgccggccatggattcgatagtcagccatcagccgctggaatataaccgctacctgaacaagctggtggcctgggcctatttcaacggcctgctgacgccgcagacccgcctgcacatcaagagcggcaacctgtgcgataccgccaagctgcaggagctggtggccgacgtttcccatcacttcccgctgcgcctgccggcgccgacgccgaaagcgctgtacagcccgtgcgagattcgccatctggcgatcatcgtcaatctggaaaacgatccgaccgccgcgttccgcaatcaggtggtgcacttcgatttccgcaaactggacgtgttcagcttcggccagcagcagcagtgtctggtgggcagcatcgatctgctgtaccgcaactcctggaacgaggtgcgcactctgcatttcagcggcgagcagtcggtgctggaagcgctgaaaaccattctcggcaaaatgcatcaggacgccgcaccgccggagtcggtggaagtgttctgctacagccagcacctgcgcggcctgatccgcacccgcattcagcagttggtatcggaatgcatcgagctgcgcctgtccagcacccggctggaacccggccgcttcaaggcggtgcgcgtcgccgggcagacctgggggctgttcttcgagcgcctgagcgtgtcggtgcaaaaactggagaatgcggtggagttttacggtgccatctccaacaacaagctgcacggcctgtctatcaaggtggaaaccgatcaggtgcatctgccgccggtggtggatggcttcgccagcgaagggatcatccagttcttcttcgaagacacctcggatgacaagggtttcaacatctatattctggacgagtcgaatcgggtggaggtgtatcaccactgcgagggcagtaaagaagagctggtgcgcgacgtcagccgcttctactcttcatcgcacgatcgtttcacctacggctccagcttcatcaactttaacctgccgcagttctatcaaatcgtgcagctcgacgggcgcacgcaggtgatcccgttccgcagcaacgtgctgtccagcctgtgcgtgacggtggccgacggcgccgctcagccgctgaagcagcagttccagctgcattgacgccgcaagggctcggtggccgagccccgcattgcctcaggaaaaacgcagttcctcaccggcctgcgcgctggccgcttcgctgagcagttggtaaaacggctgcccgctgcgatcgcataaccagacgccgtcgcggtagttgaagtggtaaccgccggccttggtggcgagccacacctggtgcagcggctcctggcggttgatgacaattttggtgccgttttcgaagctcagcgtcatcacgccgccattggtttcgtaatcgatgtccgcatcgccgtcaaaatcgtccagtgtctcttcaatattcagcatcagctggtcggccaactggtgaaactcgctgtcgttcatattcaattcctattgcttttcatgatccacctgcgattatagagaccttggacgcatgaattacaggcattaatgcaaatgaaaaaacaactacgctatgcgctgatggcagttctggttaccggcctcgccggctgtggtctgaaaggcccgctttacttcccgcctgccgaccccgccagccaaaaaccggccaagccgccggtgcaaacgggcgatcaggtgcaaaagaaccagcaggagcagtctggctctcagcaaaaaccgtcgatggttgaccagtaacaccctgtttgcggtggcgagcgccgccgtaaaatcaagacggatagcgcgtccagatagcggagtatgatatgcagttctccaaaatgcacggtctgggcaacgactttatggtggtcgatgccgttacacagaatgtctatttttcacctgagctgatccgccggctggccgatcggcacctgggcgtcggctttgaccagatgctggtggtagaaccgccttacgatcccgaactggattttcactaccgaatttttaacgccgacggcagcgaagtggcgcagtgcggcaacggcgcgcgttgcttcgcgcgcttcgtgcggctgaaagggctgaccaacaaacgcgacatccgcgtcagcacccaaaccgggcgcatggtgctcagcgtcaccgacgacgatctggtgtgcgtcaacatgggtgagccgaatttcgacccgcaggcggtgccgttccgcgccgccaaggctgaaaagacctacatcatgcgcgcggcggaacataccgtgttgtgcggcgtggtgtcgatgggcaacccgcattgtgttttgcaggtggacgacgtaaacaccgccaaggtggagctgctcgggccggtgctggaagggcatgaacgcttcccggaacgggccaacatcggctttatgcaggtggtcagccgcgatcatatcaagctgcgcgtttatgagcgcggcgccggtgaaacgcaggcctgcggcagcggcgcctgtgcggcggtggcggtggggatccaacaggaattgctgtcagaagaagtgcatgtagagctgccgggcggcagcctgcatattcgctggaaagggccgggcaacccgctgtttatgaccggtccggcaacccatgtctatgacggatttattcatctatgaaaagcgtagaagaacagagcgtcgccggcctggcgctggatgacgacaccgtgatgcagtatctgctgcagaacccggatttctttattcgcaacgcgcgccaggttgagcagatgcgcgtgcctcacccggtgcgtggcaccgtttcgctggtggaatggcatctggcccgccagcgcaatcatatcgaacggctggaagaagagatcacgctgctgatggagcaggccagcgccaacgaagggctgttcgccaggctgctgcacctgcaggccgatctggccaccgccgacagcttgcaggacatgctcaaccggctgcagcgctgggcgcgcggcttcggtttggccggcgccacggtgcgtctgttcgccgagcgctggaatatcggcgcgccttccgatttcacccatctggcgctgacgcgttcggcgttcgagccgttccgcatccagcggctgggcagcgaacaacactacctcggcggcctgaacggccccgaactgctgctgctgttgccgcaggccaaacagatcggccagattggttcggtagcgctgtcgatgctgggcgacgatggcgagctgggcatggtgatcttcagcagccgcgatacgcaacattatcagcagggcatgggcacggtaatgctcaatcaactggcgcgcatgctgccggaactgctggaacgctggatcgaacgcgcatgacgccgattgcgcccagcctgcagcagccggtggacgcttttctgcgttatctcaaggtagaacggcaactcagcccgctgacgcagctcagctattcacgccagctgacggcgctgatgtgcctggcgcaggagatcggcgtcaccgactgggcggcgctggatgccgcccgggtgcgcatgctggcggcgcgcagcaaacgcgccggcctgcagtccgccagcctggcgctgcggctctcttcgttgcgcagtttcctcgactggctggtcagccagggcgtgctgcacgccaacccggccaaaggcatccgcacgccgcgcagcggtcgccatctgccgaaaaatatcgacgtcgatgaaatgaaccaactgctggagatcgatctcaacgatccgctggcggtgcgcgatcgcgccatgctggaggtgatgtacggcgccggcctgcgtctttccgagctggtggggctggattgccgccatgtcgatatggcggccggcgaggtgtgggtgatggggaaaggcagcaaagagcgtaaactgccgatcggacgcaccgccgtcacctggctggaacactggctggcgatgcgcgatctgtttgggccgcaggatgatgcgatgtttctgtccaatcaggggcgacgcatctcgacgcgcaacgtgcaaaagcgcttcgccgaatggggcgtgaaacagggcgtcaacagccacattcacccgcacaaactgcgtcactcctttgctacccacatgctggagtccagcggcgacctgcgcgcggtgcaggagctgctcggccacgccaacctgaccaccacgcaaatttatacccacctcgactttcaacatctggcgaatgtgtacgatgccgcgcatccgcgcgccaaacgggggaaatcctgatgcatttttatcgcccgctgcgcccgctggcggcgctgactttcgatctggacgacacgctgtatgacaaccgtccggtgatccggcaaaccgagcagcagtcggtggccttcctgcagagctaccatcccggcctgaacagcttccagtcggcggatttccaccgtctgcgccaggagctgcgtgagcaggatccggagatctaccacgacgtcacccagtggcgctggcgcgccattcatctggcgctgagccggcaggggctgcgcgacgccgaagccgcgatcggagccgatgcggcgatgcaaaacttcgcgctgtggcgcagccgcatcgaggtgccggaagcgacccacgccacgctgaaggcgctggccgcgcgctacccgctggtggcgatcaccaacggtaacgccgatccggcgcagtgcggcctggacggttacttccagttcgtgttgcgatccgggccggacgggcgcgccaagccgtatcaagacatgtatcacctggccgtcgaacggctgggcgtggcgcccgggcagatcctgcacgtgggcgacgatctgactaccgacgtcgccggcgcgctgcgcgcggggctgcaggcctgttggatcaacgatcggcaacgctgcctgatgcaggccgccgacagccgcctgctgccgcatattgagatttcgcagttggcatcgctgacagcattgttataatccctgccagaactctgtataaatttccagtgaaaaacccgtcaccggcgggttttcccttaaccattagtggtgcctatggacgtctccgatctgctcgacagcctgaatgaaaaacaacgtgaagccgtggcggcgccgcgcagcaacctgttggttctggccggagcgggcagcggcaagacgcgggtgctggtgcatcgcatcgcctggctgctgtcggtggagaactgctcgccgtattcgattatggcggtgaccttcaccaacaaggcggcggcggaaatgcgtcaccgaatcgaacatctgatcggcaccagccagggcggcatgtggatcggcaccttccacggcctggcgcatcgtctgttgcgcgcccatcacctggaggccaacctgccgcaggatttccagatcctcgacagcgacgaccagctgcggctgctcaagcgcatcatcaaggcgctgaacgtcgacgagaagcagtggccgccgcgtcaggcgatgtggtacatcaacggcaagaaagacgagggcctgcgcccgcagcacgtcgaaacctacaacaacccggtggaggccacctggctgcgtatctaccaggcctatcaggaagcctgcgatcgcgcggggctggtggatttcgccgagctgctgctgcgtgcgcacgagctgtggctgaacaagccgcatatcctcaaccactaccgcgagcgtttcaccaacgtgctggtggatgaattccaggataccaacagcatccagtacgcctggatccgcctgctggcgggcggcaacagcagcgtgatgatcgtcggcgacgatgaccagtcaatctacggttggcgcggcgcgcaggtggaaaacatccagcgcttcctgaaggatttccccggcgcggaaaccatccgtctggagcagaactaccgttccaccagcaacatcctgaaagcggccaacaccctgatcgccaacaacgacgggcgcatgggcaaaaacctgtggaccgaaggcggtgaaggcgagccgatttccctctactgcgccttcaacgaactcgacgaagcgcgcttcgtggtcaaccgcatcaagacctggcaagacaacggcggcgcgctgaacgactgcgccatcctgtaccgcagcaacgcccagtcgcgggtgctggaagaggcgctgttgcagacggcgatgccgtaccgcatctacggcggccagcgcttcttcgaacgccaggaaatcaaggatgcgctggcttacctgcgcctcatttccaaccgcaacgacgacgcagccttcgagcgcgtggtcaataccccgacgcgcggcatcggcgatcgcaccctcgacgtggtgcgccaggcggcgcgcgatcgccagctgacgctgtggcaggcgacgcgcgagctgatgcaggacaaggtgttggccggccgcgccgcgtcggcgctgcagcgtttcatcgaactggtggaatcgctggcgcatgaaaccgccgacatgccgctgcatgtgcagaccgaccgggtgatccgcgactccgggctgttcatcatgtatgaacaggagaagggcgagaaggggcaggcgcgtatcgaaaacctcgaggaactggtgacggcgacgcgccagttcagctatcaggacgaagatcaggatctgatgccgctgcaggcgttcctgtcgcatgcggcgctggaagcgggcgaaggccaggccgacgcctatcaggacgcggtgcagctgatgactctgcactcggccaaggggctggagttcccgctggtgtttatcgtcggcatggaagagggcatgtttccgagccagatgtcgctggatgaaggcggccgtctggaggaggagcgccgtctggcctatgtgggcgtaacgcgtgccatgcagaagctgacgctgacctatgccgaaacgcgccgtctgtacggcaaagaggtttaccatcggccgtcgcgctttatcggcgaactgccggaggagtgcgtggaagaagtgcgcctgcgcgccagcgtatcgcgcccggtcaatcaccgccgcatgggcacgccgatcagcgagaacgataccggctataagctgggccagcgcgtgcgccatcccaagtttggcgaaggcaccatcgtcaatctggagggcagcggcgagcacagccggctgcagatcgccttcccgggtgaaggcatcaaatggctggtggcggcctacgcgcgtttggaaacggtctaacgagagaggcgttgcaggggcaagcccctgcaatcgttcaccatcagtgagggtagcggtcgccgacctgtgcggtggcgtaccagcgcatcactgcttcggtaccttcgccgccttcctgcggcgcccacggcatgcagtcttcttcggtcagcgcctgatacggtccctgcttcacttcgaacaccacgccgccggcatcgaccgacagcaccgcatgccaggtaaaggccggcatctccagcactttggtttcttcgccgagcagggtgcgctgcgtcacgacgccgtcatcgttgaactgtaatacgacgaaacggccgcgcagcggcgtcagcagctcccaggtttgcgggtggcggtgcgggcggatataggtgccgggttccatggcgatcgccaggcgttgcaccgggtcgctcagctcttcgtgtaaggtgcggtgcgcgcgcaggcgggccacgctggcggcctgttcgctcatcgcggtcagttcatgggcggtaatctgtttcatcggttaaatccgcatgcttgtcgtaccattagggtgatgtcatcttagcaacattctgggaggtggtaagcgatcgccgcgactttttcagtacggtttaagcgccatttctgccattgatcatcgtgatgatttgttgcgcaattatcccgcctaacgtgttgacaggctttttcttctcggcgtaacatgcgcgcactattatcattgaggacagacgccttggacacacccagtagatactggctcactgacctgcgccgcaggtataacttctaaggctctccgtttttgctgatagccttcgtggttgtcggcgaccccgcaaagcgtcgctatgagtcagatctcttcatggtctgaaacaaatcggtgatacgcatcccctctgtttctgtgcttcaacgcgttgtccgcacccgttaccttcacggagttttggcacatgctgagcgcttttaaattagataaccgccgcttgtcccgtctggaactggacgactcggatgatctcacgtcatcgctgtgggttgatctggtcgagccggaagagggcgagcgtgagcgcgtgcagaatgagctgggacaaagcctggcgacgcgtcccgaactggacgacatcgaagcctccgcccgtttcttcgaagacgaagacggtctgcatatccactccttcttctactttgaagatgcggaagatcacgccggcaactccacggtggccttcaccatccgcgacggtcgcctgtataccctgcgtgagcgtgaactgccggcgtttcgcctgtaccgcatgcgcgcccgcaaccagaccatgctcgaaggcaacgcctacgaactgctgctggatttgttcgaaaccaagattgaacagctggcggatgagatagagaacatctacagcgatctggaacagcttagccgggtgatcatggaagggcatcagggcgacgaatacgacgccgcgctgtcgacgctggcggagctggaagatatcggctggaaggtgcgtttgtgtctgatggatacccagcgcgcgctcaacttcctggtgcgcaaggcgcgtttgccgaccggccagctggagcaggcgcgtgaagtgctgcgcgatatcgaatccctgctgccgcacaacgaatcgctgttccagaaggtgaacttcctgatgcaggcggcgatgggtttcatcaacatcgaacagaaccgtatcatcaagatcttctcggtggtgtcggtggtgttcctgccgcctacgctggtggcctccagctacggcatgaactttgaattcatgccggaactgaaatggtcgttcggctacccgggcgccatcaccttgatgatcctggcgggcctggccccttacctgtacttcaagcgcaagaactggctgtaactcggcggcgccgggctcagcgcagcttgcgctgggtatagagcgcgtcgagggtgaacaggatcagcgccgcccagataaagccgaaggtcaccagcttgtcctggccgacggtctcgccgtagaaggtgaccgccagcaggaacatcagcgtcgggccgagatactggaagaaaccgagcgtcgacaggcgcagccgggtagccgccgcggtgaagcacagcagcggcacggtggtgacgataccggcggcgaccagcagcagattcagcgaccacgggttggcgctcaggtggctggtggggctgtcggcgaacaggaacaggtagcccgccgccaccggcagcagccacagcgtttcaatcagcatgccggtctgcgcgtcgatggcgattttcttgcgcagcaggccgtagaaggcgaagctgaacgccaggcccagaccgatgatcggcaatgagccgaactgccagagctgcaccagcaccccggtgaacgccagcgccaccgccacccactgcatgcggcggaaacgttcgccgagaaacagcatccccaacagcacgttaaccagcgggttgatgaagtagcccaggctggcttccagcatatggtgattgttcaccgcccagatgaacagcagccagttgccgccgatcaacagcgcggtgaccgccagcaacagcagccgtttgcggttttggcaggcggcgcgcactttcggccagttgcggcccagcgtgatcagcgccagcatgaagaaaaacgaccagatgatccggtgggtgaggatctcgtccgcggatacttgctggatcagtttgaaataggccggggcgatgccccacataaaataggcggccagggcgaagaaaatgccctgacgcgtttgctttgcgtccatgacgtcactctggtggggaacgtaagatgcggtgagtgtactgaagtcgctcaccgcacacaatcatcagccgaccagataggtggcggtagcggtcgcgatatgcaggccgtcgtggttatgcagttctacgcgcgcgacggcgaccttgttgccgctgcgcagcacgctggcggaggcgacgaagtgttcgccgcggccggggcgcagatagtcgacgcgcagatcgatggtgcccatgcgcgacagtttggcggcgatctcctcttcgatcagcggttccatgcgcgtcagcacgccgccggcgcaggccagcccggcggcgacgtcgagcaccgcggcgatcacgccgccatgcagaatttcctgcgcggcgttgcccaccagcttgcgctggttggtgaagctcagctcgacgtagtcatcgtcgaagcggcgcagctccaggccaagctcgcggttgaacggcatgtggtagacaaagatttcgccgatcttgcggcgggcggcttccagggtcagagcagtggttgacatagcggggttccgtttttcttttgcgttttaagggagctaactggtcagtccaggttaatggaatgttgattttatgcttaacctttgttgctttccagactattccaataaaaccggaccgcgctgcggtaaatcctcctttgtgtgtaaaatggcctgattttttccgggcttgccctttttcgttggagtaaggagaggttatgcgcattttgtcagggatcgtttccgccacgctgttgatgccggcgctggcattggctgaggaagccaaagagcagcagattcacgataagccgacggtgcgcggcagcattatcgccaacctgctgcaggagcacgataatccattcacgctgtatccttacgatcccaattacctgctgtacaccgacaccagcgatatcaacaaagaagccatcaagacgtacaactgggccgacaaggcgcgcaaggacgaggtgaaataccagcttagcctggcgtttccgctgtggcggggcattgccggcgacaactcggtgctcggcgcgtcttatactcagcgctcctggtggcaattgtccaaccgcggcgagtcttcgccgttccgcgagaccaactacgagccgcagctgttcgtggggtgggcgaccgattaccgctttgccggctggacgctgcgcgatgttgaaatcggcgttaaccatcagtctaacggccgctcagatccgacgtcgcgcagctggaatcgcggctatgcgcggctgatggcgcaaaatggcaactggcaggtggatctcaagccctggttccgcttctcggagagctcgagcaacgacgacaacccggacatcaccaaatacatgggatactaccggttgaaggtcggttacgcctggggcgacagtgtgttcagcgtcgacagccactacaactggaacagcggctacggcggcgcggaactgggctggagttacccgatcacccgcaacgtgcgtttctatacccaggtgttcagcggctacggcgaatcgctgatcgactacaacttccggcagacacgggtgggcgttggtgtcatgctgaacgatattatgtaatcatacccgatgggtgtgtaccgatgaaaaaatggggaagtgtgtgtcaaccgcagcagtgattaacagagagttgctggccgagcaggtattgcgcgatacctttggctaccagcaattccgcccgggccaacaaacgattatcaacgccgcgatcggcgggcaggattgcctggtggtgatgccgaccggcggcggcaagtcgctgtgttaccaaatcccggcgctggtgatggacggcctgacgctggtcgtttccccgttgatctcgctgatgaaggaccaggtcgaccaactgttggcctacggcgtttccgccgcctgctacaactcgacgcaaacccgcgaggagcagctggacgttatggccggctgccgcaacggtaccatcaagatgctgtacatcgcgccggagcggctgatgatggaaagcttcctcagcctgctcgatcactgtccgccggcgatgctggcggtggatgaggcgcactgtatttcgcagtggggccatgacttccggccggaatatcgcgcgctgggtcagctgaaacagcgcttcccgtcgatgccggtgatcgcgctgaccgccaccgccgacgaggccacccgcggcgatatcgtgcgcctgctgtcgctgcaggacccgctggtgcaggtcagcagcttcgaccggccgaacatccgctacacgctggtggaaaaattcaaaccgctcgatcagctgtggcgcttcgtgcaggatcagcgcggcaagagcggcattatctattgcaacagccgcgccaaggtggaagacaccgccgcgcgcctgcaaagccgcgggctgagcgtcggcgcttatcacgccgggctggacaacgatcgccgcgcccaggtgcaggaagcgttccagcgtgacgatctgcaggtggtggtggccaccgtcgccttcggcatgggcatcaacaaacccaacgtgcgtttcgtggtgcatttcgacatcccgcgcaatatcgaatcctattatcaggagaccggccgcgccgggcgcgacggcctgccggccgaagccatcctgctgtacgatccggccgatatggcctggctgcgccgctgcctggaagagaaacccgccgggcaacagctggacatcgagcgccacaagctgaatgccatgggggcgttcgccgaggcgcaaacctgccgccgcctggtgctgctcaactactttggcgaaggcaagcacgaaaactgcggcaactgcgatatctgcctcgatccgcccaagcgctacgacgggctggaggacgcgcgcaaggcgctgtcttgcgtgtaccgcgtcggccagcgcttcggcctcgggtacatcgtggaagtgctgcgcggctccaacaaccagcgtatccgcgaatatggccacgacaagctgccggtgtacggcatcggccgcgatcagaccaccgaacactggaccagcgtgctgcgtcagctgatccacctgggttttatcacccagaacatcgccatgcactcggcgctgcaattgaccgaggcggcgcgcccggtgttgcgcggcgaggtggcactgcagctggcggtgccgcgcattcagagcctgaagtcgcgcagcagcgccaaccagaaatcctacggcggcaattacgatcgcaagctgttcgccaagctgcgcaaactgcgcaagtcgatcgccgacgaagaaaacattcctccctacgtggtgttcaacgacgccacgctgctggaaatggccgaacagatgccgatcaaggccggcgatctgctgagcgtcaacggcgtcggccagcgcaaactggagcgtttcggcgcgccctttatggcgatgatccgcgaccatctcgacaatgacgaagactgagggcgataaatcatgctaatgctgtttctcaccgtggcgctggtgcatctgattgcgctgatgagcccggggccggacttcttttttgtgtcgcaaaccgccgccagccgttcgcgccgcgaggcgatgatgggcgtggtcggcatttcgctcggcatcgtggtgtgggccggcgtggcgttgatggggctgcacctgatcctgcagaagatggcctggctgcatcagatcatcatggtcggcggcgggatgtacctgtgctggatggggtggcaactgctgcgttccgcgcgggcgcagcaagcgcagccggcagcggaggcccaggtggcgttgcccaaggccgggcgcagctttattcgcggcttcctgaccaatctgtccaacccgaaagcggtgatctatttcggcagcgtgttctcgctgttcgtcggcgacagcgttggcgccggagcgcgctgggggctgttcttgctgatcgtcgccgagacctttgtctggttcagcctggtggcggtggtgttcgcgctgccggcgatgcgccgcggctatcagcggttggccaagtggatagacggggtggcgggcgtgctgtttaccggcttcgggttacacctgatctttacccgctgaccggcagtgaaatgcccaaggccgagcagcgatgcccggccttttttgtcaggctttgcgggcagtcgccagcagccccgccaccagaatgaacagcgaaccgaacagtcggttgagcaactgcatctggcgcggtgttctcagccagccggcgatgcgcgtcgccaaagtggcgtaaccgatcatcaccagaatatccaccaccacggtggtgacgccgagcaccagatactgctcggcctgcggctgattgggcaagatgaactgcgggaacagcgcggcgagaaacacgatgcttttcgggttggtcaggttgaccagcaccgcgcggcggaacagacggcggcgcggcatgctgcccgccagcgcatgcagatccagcgcgccggcggcgcgccactgctggatgccgagccacaccaggtaggcggcgcccaaccatttcaacagttcgaacgccagcagcgattgcgatatcagcgcgccgagaccgatgcccaccagcacgatgtgcgcgctcagcccgacctgcagcccggctatcgaggcggcggcgccgcgatagccgtggctgatgccggtgctcatggtattgatggcgcctgagccgggggaaaggctcaggataagcgtggtcagcagataggttaaccaccagtccaaggtcatggtgcttcggctccctgaaagtgtcgttttgtgccacaatgcgccgaggcggcgccgtttttgtcagaattgaatcacaatacgctagtatgatttcttgtgccagcggtcacattttccgccggccccacagggaaaacgctctcgatgacctcgttcactctcagctccgatgactggttaacgcgtgaaacgcagttcgctgccttcgccaccgggccgctgctggatttctggcggcagcgcgaagaaggcgaattcagcggcgtggacggcgtgccgatccgctttgtgcgcttcagttctgcgcggcatcagcgagtggtggtggtcagccccggccgcatcgaaagctacgtgaaataccccgaggtggcctacgatctgttccactgcggctacgacgtggtgatcgtcgatcatcgcggccaggggcgctccgggcgtttactggcggatacgcaccgcggtcatgtggtaaacttcgccgactacgtggatgatttcgaacagctgtggctgcgcgaggtcgaatcgcacggttatcggcagcgcttcgcgctggcgcattcgatgggcggcgcgatcctggcgcagttcctgcagcgccggccgcaggcgttcgacgcggcggcgttttgcgcgccgatgttcggcatccggttgccgatgccgggttggctggccgatcgcattctcgactgggcggagacccgcccggcgatccgcgactattacgcggtgggcaccggccagtggcgtccgttgccctatgtggtcaacgtgttgacccatagccgcgagcgttaccggcgcagcctgcgttattatgccgattaccccgagctgcaggtgggcgggccgacctaccattgggtgcgggagagcatccgcgccggccggcagattatcgcgcaggccgggaagatcaccacgccgctgttgcttttgcaggccggtgaagaacgggtagtcgacaaccgttcgcaccaggctttttgtcaggctctgtcagacgcggggcgcccttgcgaaggggggctcccgtgggttatcaacggcgcacgccatgagatcctgttcgagcgggacgcgctgcgcgccgaagcactgaacgcaattctgcgcttctttgctcaacacttaggcggcgcgctgccgccgacaactccatcagaggttagaacataacgctatgtatcacgtcgtcgcttccgatttagatggcacgctgctgtctcccgaccataccctgtcgccgtacgctaaagaaacgctgaagttgctgactcagcgcggcgtgcatttcgtgttcgccaccggccgccaccatatcgacgtggcgcagatccgcgacagcctggagatcagcgcctttatgatcacttccaacggcgcacgggtgcacaacaccgccggcgaactgattttcagccacaacctggacggggatatcgcccgcgatctgtacggcatgctgcacgacgatccggatatcaccaccaacgtctaccgtaacgacgattggtttaccaaccgcgaaagcccggagcaggaagagttcttccaggagtcggtgttcaaatatcagctgtttgagccgggcctgctggaaaccgacggcgtctgcaaggtttacttcacctgtgaagatcacgagcggttgctgcaggtggaagacgccatcaacgcgcgctggggcgatcgggtcaacgtcagcttctcgttccctacctgcctggaagtgatggcgggcggcgtgtcgaaagggcatgcgctggaagaagtggccaagatcatcggctatacgctgcaagagtgcatcgccttcggcgacggcatgaacgatctggagatgttgtcgatggccggcaagggctgcatcatgcgcgacgcgcatcagcgcctgaaggacatgctgccggagctggaagtgatcggctccaacgtcgataacgcggtgccgcactacctgcgcaagatgttcctttgaaataaccattaaataacaagggcgcctcgcggcgcccttggcattacttgtgctggccctgcttctgcaggaactgcacgcccttgtccgggaagtcggtgaacacgccgtcgacgccggcctggttgtaaatcacgtcatacagctggttcacgtcggtcacgtacttcggcagcgcatcggcgcggatggtgaacggatgcaccgccagcttgctggcgtgcgcttctttcaccatgtcggtcagcacgatgtggcccggcttggattgatccgccaccaccagcatgtggtagtccggcccgatgccgtcggcatactgagcgattttcttcatcgcgcccggtttgaacatccagtcgtagtcgtattccacccacttgccgtcggctttctgctcataggtttcctgccagtcgttataggcgatcagctgcaccagcttcagatccatgcccagcttcggctccagctcgttcttgatgcgcttgagctcgttggcgtcgaagcactgcaggtagacgttgtcgttcttgccggtgtagccgtactgcttgagcaccgccagcactttgctggagatgtctttgccttcctgtttgtggaaccacggcgccttgatttcagggtagatgccgatgttcttgccggtcgaatggttcagaccctgcacgaactcgatctcttcctggaaggtgtgcacgcggaagtcggatttgcccatcgggaagcggccagggtagccctgcaccttcttgccgttttcgatttcaaagccttcggtgaacttcagcgatttgatctccgccagcgtaaagtcgatggcgtaataacggccgtctttacgcgcgcggtccgggaagcgttcggcgacgtcggtgacgcgatcgaggtaatggtcgtgcagcaccaccagctcgttgtccttggtcatcaccagatcttgttcgagataatcggcgccctgcgcgtaggccatcgccttcgccggcagggtgtgttccggcaggtagccgctggcgccgcggtgggcgatgaccactttgtccgccgcctgcgcggcgctgaccatcgaggtggcgagaatgatccctgtcagcagggctttgacttgagtccgcattccgttttctccgtgttgttgggggcagggtagtaaaaaggccgcagggcggcctttaaatcatgcaaaagtcgtgtgacgcttaaccgcgcttggcggcgatttccgcgtggtgtttcttctcgttcagcatggtcagcagcagcaggatgaccgctgcgatgctgccgccgatcatcaccatgaagccgccgtcccaaccgaagaagtccacggtgtaaccgacgatggcgctggccgcgaccgagccgcccaggtagccgaacaggccggtgaagcccgcggcggtgccggcggctttcttcggcgccagctccagcgcgtgcaggccgatcagcatcaccgggccgtagatcaggaagccgatgaccagcatacagatcatgtccacggtcgggttgccggccgggttcatccagaacaccacggtggcgatggtcaccagcgtcatgaagaacacgccggtggcgccgcggttacctttgaacactttgtccgacatccagccgcacagcagagtgcccgggataccggcgtattcatacaggaagtaggcccaggaagacttgtccagcgcgaagtgcttcacttctttcaggtaggtcggcgaccagtccagaatgccgtaacgcagcaggtagacgaacacgttggcgaccgcgatgtaccacagcagcttgttcggcaggatgtactgcatgaagatctgcttggcggtcagctcttcttcgtctttttcgctgtagtcgtccggatagtcgtttttgtactcttcaatcggcggcaggccgcaggattgcggggtgtcgcgcatcagggcgaaggcgatcagggccaccaggatggcgccgaaggccggcatgtacagcgccgcgtgccagtcgttgaaccaggccatacccagcaggaacagcagcggcggcaggccgccacccacgttgtgggcgcagttccagatggaaacgatgccgccgcgttctttctgcgaccaccagtgcaccatggtacggccgcacggcggccaacccatgccctggaaccagccgcacaggaacagcagaacgaacatcaccgcgatgctggaggtggcccacggcacgaagcccatgaacaacatcaccgccgccgccaggatcaggccggcaggcaggaacactcgcgggttggaacggtcggagaccgaacccatgatgaatttggagaagccgtaggcgatggagatgcccgacagcgcgaagccgaggtcgccgcggctgaagccttgttcgatcaggtaaggcatggccagggtgaagttcttacgcaccagatagtaagcggcgtaaccgaagaagatccccaggaaaatttgccagcgcagcttacggtagagcgggtctaccttatcgctcggcacacgggcgatgtgtgcggccggcttaaaaatactcaacatgagcgcctccgatggctttatctgttatcacatcaatatgaccttttacgttcatttgatgattgagcggatatcgaatgtggtgtttttgtgttccataacgagcgccattgtcgacaaatacgcctggtgtcgctgtgacgaatggcgcaattgttacactttcatgaaaccacggcggattttgagcgattcgttaacgttatgaaatagaaaaacgtccaaaaatcgtgattatgatcacattgatggttttttgtggacatttttatttcgttttatgttcgttcttgttccttatcaaacaaagaccctaataaccgtggctcaataggctcataactaccgatcctgagggagcgacatgagcagctattttgacggcggcgaaacggatgtgatcatcatcggcggcggcgccaccggcgcaggcattgcccgcgattgtgcgcggcgcggcttgcgctgcattttgctggagcgtcacgacatcgccaccggcgccaccggccgcaaccacggcttgctgcacagcggcgcgcgctatgcggtgaccgacggcgagtcggcgcgcgagtgcatcgaagagaaccgcatcctgaaacgcatcgcgcatcactgtatcgagcgcaccgatgggctgttcatcaccctgccgcaggactcgctggagtatcagcaacagtttatcgccgcctgtcgccaggccgacatcgacgccgaagcgatcgacccgcagctggcgctgcggctggagccggcggctaatccggcgctgattggcgcggtgcgggtgccggacggcaccgtcgatcctttccggctgaccgccgccaacatgctggatgcgcgcgaacacggcgcgcagatcctgacttaccaccaggtggtcggattgttgcgcagcggcgaccgggtgacgggcgtgcgcgtttacgaccatcagaatcagcggcgctatgagctgcacgcagcggtggtggtcaacgccgccggcatctggggccagcagatcgccgaatacgccgatttgcgtatccgcatgttcccggccaagggagcgctgctgatcctcggtcaccgcatcaacaacatggtgatcaaccgctgccgcaaaccggcggacgccgacatcctggtgccgggcgacaccatctcgctgatcggcaccacctcgacccatatcgactacgaccaaattgacaacatgctggtgaccccgcaggaggtggacattctgatccgcgagggggcgctgctggcgcccaccctggcgcagacccgcattctgcgcgcctatgccggggtgcggccgctggtggccagcgacgacgatcccagcgggcgcaatgtcagccgcggcatcgtgctgctcgatcacgccgcccgcgacgggctggaagggtttatcaccatcaccggcggcaagctgatgacctaccgcctgatggcggagtgggccaccgacaaggtgtgcgaaaagctcggggtaaaccgcccgtgcaccaccgcgcaggacgcgctgcccggatcccgtcagtcggcggaggaaacggtgcgcagcgtggtttctctgcccgccagcatccgcggctcggcgatttaccggcacggcgatcgcgccagccaggtgccggcggccgatcggctcgacaccagcctggtgtgcgagtgcgaggcggtgaccgccggggaagtgcgctatgcggtcaattcgctgaccgtcaataacctggtggatctgcgccgccgcacccgcgtcggcatgggcacctgccagggtgaactctgcgcctgccgcgccgccggactgctgacgcgcttcaaggtcagcacgccgcagcaatccatcgcgcagctgtcgcagttcctcaacgaacgctggaaaggcgtgcggccgatcgcctggggcgatgcgctgcgcgagagtgaatttaccagttgggtttaccagggattatgcgggcttgaggcccaggcagacaaagagcaggaggcggatgatgcgatttgacgtagtggtgattggcggcggcctggcgggcctgagctgcgccattgccgtggccgaacagggcaaacgctgtgcggtggtcagttccggccagagcgcgctctacttctcctccggctcgctcgatctgctggcgagattgccggacggcacgccggtcgagatgccactggcggcgctgccgcagctggcgcaacaggcgccgcagcatccgtattctctgattggccccggccgggtggcggcgctgtccgccgccgcgcagcggctgctggaacgctgcgggctgaatctccagggcgagggggtgaacaaccatctgcgcatcacgccgctcggcacgcgccgcgccacctggctcagcccgcaggcgatcccgacgctgccgctgaccggccaactgccctggcggcgcattgcggtgatcggcatcgaagggttcctcgacttccaaccgcagatggccgccgacgccttaagccgcgagctcggcgtgcagacggacgtggcctatctgcacatgccggcgctggacagattgcgcaataaccccagcgagttccgcgcggtgaacatcgcccgggtgctggatttgatggaaagcctgccgccgttggctgaagagctgcggcggctggcgggcgaggccgaggcgctcttcctgccggcctgtctgggcctggaggacgacgcgtcgctggcggtgttgcaggatgcggtcggcaagccggtccgactgctgccgacgttgccgccttcggtgcccggcatgcgcttgcaccaggcgttgcggcggcgtttccaacagctgggcggcgttttcatgccgggcgacagcgtgctgcgcgccgagtgtgaagccggccgcgtcaccggcctgtatacccgcaaccacggcgatattccgctgcgggcgcagcaggtggtgctggccagcggcagcttcttcagcaacgggctggtggcggatttcgatgaagtgcgtgagccgatcttcgggctggacgtacacagccgggcggatcgcgccgactggagccgacgcgagctgttcgcgccgcagccttacctgcagttcggcgtgcgtaccgacggcaggctgcgggcgatgaagcagggagtgccgttcgacaatctgtatgccatcggtgcggtcgccggcggttacgatccgctgcagcagggctgcggcgccggcgtgtcattgatcggtgcgctgcacgttgcgcagcagatcgccgcggaggagaacgcatgagcctgcatcaggatcacagctttgaaagctgcatcaaatgtaccgtctgcaccacctactgcccggtcgccaaagtgaacccgctctacccggggccgaaacaggcggggccggacggcgagcggctgcggctgaaagacccgacgctgtacgacgaggcgctgaaatattgcaccaactgcaagcgttgtgaagtagcctgcccgtccgacgtcaaaatcggcgacatcattcagcgcgcccgcgccgactttgcccagagcaagccgacgctgcgtgacgccatcctcagccacaccgatatcatgggatcgctgtcgacgccgttcgcgccgatcgtcaacgccgccaccgggctgaaaccggtgcgcaagctgctggacaaggcgctgaagatcgatcaccgtcgtgaactgccgaaatactcgttcggcaccttccgccgctggtaccggcaacaggcgcaggcgcagcagcgttacgccgagcaggtggcgttcttccacggctgcttcgtcaactataaccacccgcagctgggcaaggatttggtccgggtgttcaacgcgctggatatcggcgtgcagctgctgaaacgcgagaaatgctgcggcgtgccgctgatcgccaacgggtttatcgagcaggccaaaaagcaggccagggtcaatgccgaatcgctgcatgaaacggtgctggagcgcggcattccggtggtggccacttcgtcgagctgcaccttcaccctgcgtgacgaataccctcatctgctggacgtggacaccactgcggtgcgcgagcgggtggagctggcgacgcgctatctctatcgtctgatcaatcaggggcgcagcctgccgctcaagcgcacgccgctgcgggtggcttatcacacgccttgccatatggagaagatgggctggaccgcctacaccctggagctgctgcggcagataccggggctggagctggtggtgctggattcgcagtgctgcggcatcgccggcacctacgggttcaaatcggagaactacgccacgtcgcagggtatcggcgcaccgctgttccggcagatagaagagagcggggtggatctggtggtgaccgactgcgagacctgcaaatggcagatagaaatgtccaccagcaaacgctgcgaacatccgatcaccctgctggcgcaggcgctggcataaagcgaaagggccggcaagccggccctttgtgggattactgcttcagcttcagggtggagatgatgccttcggcttcggtctgcgcctgctgctgattgtccgccggcagcgttacctgaatggtcagcatgttgttgttcagcgagccgatcaggacggaagaataggctttctcgccgccgctggtgatgatgctgtccagctgacgcagcggtacaccgttgacgtcgagcgctttgttggtgatcacctgcaggttggcgtcacgcgcgcgttgggtattctccaggcgcttggccagggtctccaggctgtcggcggtcttgtcacccaggatcacaatcaccgcgcgctggccggtgctgtctgcgtaaacatgcatgttgttggcctggttgcccagcttgccgctctgatccgccatgccgacaggcagggtgaacgccagtttaccgtccagcaggctcacctgctgcccggccggcgcgctggccgccgcgccgtccgttgccgccttggtgtctttggtttcgccgtcgcaggccgcgaggccaagcgccagcaggctgatacccatcaatttcgctactttacgcatcgggcttccttcttcctttccggtagggattcactgtcgtatcgcaacctattccaggttgaaatgcaaggcagatgttgtcacaagtttttttccagtaatagccgataatcagccacttcgcctttcttttccagctgaacaatctgatagtggtgggcgatcagcagcgtcagcatggcgcggaaccggttacgggttttgaccgtcagttggcgatagccctgcgcccgcgcccagcgctcttgttcggccaacaaggcctgcgccacgccgtggcgacgaaatgccggcaacacgccgcccagccagctgtaaaacaccgtttcctgccgttgataaccgagtttgaaaccggccggttgcccggctatctcggcgatcaacaggctggcgggggcggcgccgatgcgccgctgcagatcggccaggctatgcaggccgccgaattcggggatgcgttggtaaaggcggtggatgtcttcaagcgtggcggtgcggacgatcggggtcatgagcggcctccaaaggatagggccgcccagaataacacgactcagcccggctgcaggccgccgctgcgcgccgcgatgcgtttgagcagcatgttcagcaatacgccgtacatcggcaggaagaacagcaggcagatcatcaccttgaagctgtaatccaccagcgcgatctccacccagttgttggccatgaagggatcgctgctcttataaaaggcgatgaagaagaacgccagcgtatcgctgatgttgccgaggaacatcgccgccgccggcgccacccaccacgcgctgcgttgacgcaggcggttgaagacgtgtacgtcgaggatctggccgagcacataggccataaagctggcgacggcgatgcgcgccacgaacaggttaaaactgttcagcgccgcaaagccctgccattctccctgataggtgacggtggagatcacataagagatgaacagcgccggcaccatcaccgccaggatgatgcgccgcgccagcggcgcgccgaagatgcgcacagtcagatcggtcgccaggaagataaacgggaaagtaaaggcgccccaggtggtatggaagccgaaaacggtgatcggcagctgcaccaggtagttgctggaggtaatgatggcgatatgaaacagcgaaagccagaccaacgcggtaaagcgctgctgtgcggtaaacgaatacatgttgtagcctttttagcagtggggtgagggaacccagtgtgtcttgtcaaaacagcaaaaaacgctgcgcggcggcatgatacgcgtttgcgcaaccaatgcaatggttaaatttaacgcaaacgttaacgcatcttgcgcagaaaaactaccggcgtaaactaggcgctaatgagatgcggcgagcgttcgccgatcgtttttgaacgagaaaaattgcatgactgacttatttgcccaggcagaccagacgctcgacgcgctggggctgcgctgtccggaaccggtgatgatggtgcgtaaaaccgtgcgccatatggacaacggcgaaacgctgctgattatcgccgacgatccggccaccacccgcgatatcccggggttctgccgctttatggagcacacgctggtggcgcaggagaccgaacaggtgccataccgttatctgttacgtaaaggcgtctaacggcggcgcggccgagttaaaagtttcctcccccaaatgacaacgggcgcggtatgccgcgcccgtgtttgtttcagagcttagctgcgctttctcaatagccgcagcgcgttggcggtgaccagcgcggtggcgccggagtcagccagtaccgccagccacaaaccggtcagccccagcaggctggtgatcaggaagacccccttcaaccccagcgcgatggtgatgttttgccggatattggcgtgggtggcgcgcgagatgcggatcatctccgcgacgcccaccagccgattgtgggtcagggcggcgtcggcggtttccagcgccacgtcggtgccgctgcccatggcgatgccgatgttggaggctttcatcgccggggcgtcgttgatgccgtcgccgatcatcgccgtcgggcgcagttcactcagttcggtgaccgctttgaccttatcttccggcagcagaccggcgcgatagtcgaggcccagctcgccggcgatcgcggcggcggcgcgcgggttgtcgccggtcagcatcacgccgcgaatgcccagcgcgttcagttcggctatcgcctgcttggcgtcgccgcgcagcgtatcgcgcagcgccagcaagccgatgggcgcgccgtcttccagcaccaccaccgccgttttgccggcgttttccagcttgtctacctggctctgccattgggcgtcgagcagacccggcgccagcttgcccggcgcgctgatcagcacggtcttgccgtccacgatcccttccacgccgacgccggccagcgcacggcgcgcctgcgccagcggcaactcagccccgcttgcggcggcgcggttgatgatcgcctgcgccagcgggtgatgtgaaccggcttccaccgcggcggcaagctgcagcagccgctgttcggtgagcgcgccgatcggcagcacgtcggtcaccgtcggcttgccttcggtcagggtgccggttttatcgaaggcgatggtttggatctggcccagttgctccagcgccgcgccgcctttaatcagcgcgccgcgccgcgtggcggccgccagtccggatgtgatggccgccggcgttgagatcaccagcgcacatgggcagccgatcagcagcagcgtcaggccgcgatagatccaggtatcccacggctgcgagaacagcaacggtggcaccaggatcaccgcgacggccagcagcataatggccggggtgtaatagcggctgaagcgatcgaggaagcgttcgatcggcgcgcggcgctcctcggcctcttcaatcagctgcaggatgcggtcgatggcgtttttgccgggctcggatatcaccttcatctgcgccgcctgatcgacggacaggctgccggcggccactttctccccctgttggcgctcgaccggcaccgattcgccggtcagggcgctttcatcgaagctggcgaacggattgagcagctcggcgtcggccggcaggcgcccaccgggcgcgatttcaatcacgtcgccggggcgcaggttggcgaccggcacgcgtttgcgttccgtgccttgcagcagcagcgcatcttccggcaccagctccatcagcgccttcaccccgcgccgtgcgcggttggcggcgtaggattccagcagttcgccgaccataaacagcagcagcaccatcgccgcttcggcggtggcgccaatgaacagcgcgccgatggccgccacgctcatcagcgtttcgatggcaaacggcgtgccggagcgaatcagacgcagcgccttggcggcgaccggcgccaacccgaccagcgtggtggcgataaaggcgatgcggcccagctccgggttaacccgatccagcacccaactgaccaccatcagggtggttaacagcagcagcggcgcgaattcgccgaagcgtgaggttttcggcgcggcggctttggcggtctgagcgccgagcagggtaaagccggcctgggtgaccgcatcctggatccgcaggctgatgtcggactgcgcgtcgaccaccagtttctcggtggcgaacaacacgcgcgcgctgtcgacgccggggagtgcggtgacggcattttcgattttcttggcgcagctggggcagtccatgccggtgactttccagctgaaacgttggctgccggaagggggagcggcggccagcctgtcgctttcctcgtccggatcgtcgggcgcggcggtgcagcagccgctatcgccatgatcgtgatgatggtgggcgtgttcggcctgtgcggtggcgtttttcggttcgctgctgcagccgtgctgagttttgctgtggctgtggttgcagccgcatccgccttcggcgtggtgatgttcctgatgattatggttttgctgattgtgcataacgtccccctgcgggctgttaaacgggtttgctcaactgactctacaccctggagtccactccagagtcaagcgccggatgagaattattgctaacggcgttcaagcgtagaaaggggggtattcattcaataatgaataatgcggattttaatctatcggcttttcttatcccctattggggcgaaaaggcacgctgccgttagtttaaataagaaaataatattcctatagaaactaaaaaatcgcccgacctaataataaagagttattaatctataacgctttagcaaaatttaccttttcccctgagtaaagccagcatgattcgcttgagtctgcaggccgcattgctattgaagtttggtgccaacttatcctcatcaagtttcatttgttttgtaaataagcctaaaaagcagcataacaaactttcgttgcgataataaatggttgattattttatgtgcagttttgcgaccctgcctataattggaatcgattaccatttttaatggtgatcttatttgctgatatatatgcattaattctacctaacacactgccggtaacggcgcataagccccttccagcaagcttaaggtttattaaccgtggcttacggggaggttatgtctatctgtctgattgatatcaatcaggtaatgagtggaatcgaaccaatgcaatctactaaaaaggcaattgaaattactgaatccagccttgcggccgcgacaaccggctacgatgctgtagatgacctgctgcattatcatgagcggggtaacgggattcagattaatggcaaggattcattttctaacgagcaagctgggctgtttattacccgcgagaaccaaacctggaacggttacaaggtatttggccagccggtcaaattaaccttctccttcccggactataagttctcttccaccaacgtcgccggcgataccgggctgagcaagttcagcgcggaacagcagcagcaggctaagctgtcgctgcagtcctgggctgacgtcgccaatatcaccttcaccgaagtggctgccggtcaaaaggccaatatcaccttcggcaattacagccaggatcgtcccggccactatgattatggtacccaggcctacgccttcctgccgaacaccatttggcagggccaggatttgggcggccagacctggtacaacgtcaaccaatccaacgtgaagcatccggcgaccgaagactacggccgccagacgttcacccatgagattggccatgcgctgggcctgagccacccgggcgactacaacgccggtgagggcaacccgacctataacgacgtcacctatgcggaagatacccgccagttcagcctgatgagctactggagtgaaaccaacaccggtggcgacaacggcggtcactatgccgcggctccgctgctggatgacattgccgccattcagcatctgtatggcgccaacctgtcgacccgcaccggcgacaccgtgtacggctttaactccaataccggtcgtgacttcctcagcaccaccagcaattcgcagaaagtgatctttgcggcctgggatgcgggtggcaacgataccttcgacttctccggttataccgctaaccagcgcatcaacctgaatgagaaatcgttctccgacgtgggcggcctgaagggcaacgtctcgatcgccgccggtgtgaccattgagaacgccatcggcggttccggcaacgacgtgatcgtcggcaacgcggccaacaacgtgctgaaaggtggcgcgggtaacgacgtgctgttaggcggcggcggggcggatgaactgtggggcggtgccggcaaagacatctttgtgttctctgccgccagcgattccgcaccgggtgcttccgactggatccgcgacttccagaaagggatcgacaagatcgacctgtcgttcttcaataaagaagcgaatagcagtgatttcatccacttcgtcgatcacttcagcggcacggccggtgaggcgctgctgagctacaacgcgtccagcaacgtgaccgatttgtcggtgaacatcggcgggcatcaggcgccggacttcctggtgaaaatcgtcggccaggtagacgtcgccacggactttatcgtgtaacacagcaacggaacgcccggcgcagtctcggccgggcgtgatgcaggagcccggtatgaaaggtactttaacgcgcgccgctttggcggcgggtggcatgatggtgacgagtgcggtgatggccggcagtttggcattgccgaccgcgcagtcgctggcggggcaatggcaggtggccgacagcgaacggcaatgccaaatcgagtttctggcgcatgaacaaagcgagaccaacggctatcagctggtggatcggcaacagtgtttgcagagcgtgtttgcggcggaagtcgtgggctggcgcccggctccggacggcatcgccctgctgcgggcggatggcagcacgctggcgttcttctcgcgcgacggcgatctgtaccgcaatcagctgggtgcggatgatgctctgacgttgaaagcgctggcttgatgaagaaacgggttcggcgcgccgaacccgcggtaggtctctacaggtagagcgaacgcacgatcaggaagtggccggagaagtaacagaaagccacgatggcgtccgccgcgcggaaggtgaagcggtagcggttgagcagccaaaccacgttggccagcagcagcagcgaggtgccggtcagcagcgagaagccgaaatcggtgctgcgcaggaaatattgttcgcccgccagccagaccatcagcagcgtcatcgctacgtaggtaacgatcggccagcgcatctcttccagccgggtccagacggtggccagcagcagtgcgccgatcgccagcagcgccagcggcagcggccagaacaggctgaacgtcatctggctggcgaaactcagggtgtacagcaggtgggacaggaaaaaggcgccgatggcatacagcacccgttcgcgcggcaacaggagcaatgcgtcgccgatcagcgtcgccagcaggccgagtacgatcagataacccgcagcgctgagcaccggcgcctgccaggccaacagcaacagcagcagcagcgtgacgggtttgaacacccagcgctgccagcgcggcccacggtaagaggcgtcgacgaacagccaaccggaaaagaatacggcaaggaacggccaactcattatgtcttccttatgtaggagggagccgcaacaaccggctccaaactgtcaccaatgtcacttcttcatttcagtgtaggtagcctgccggcgatcgacaatgctttcttgagaatgctatgtttacgctgatttagccgcgaaggaaatgggaaaccgatgagtaagccaccgttattttttgtcgccgtgattgcgctgatcgccgtgctggccacgcaacgctacttcaagcagcggcagcaggaggcggaaaacgatcgcgcgccgatgcgcagtctgcaggtgacggtgagcgacaaacgcgcggtgccggtcaccaagacccgcgcgccgcagcgcgagccgttggtcaatgaaccgatgaattacgaggtggtgttcagcccggtacagggaggtgaagacatccagctgcggctgaagcaatggcagtacaacccgatagaaaagggcgcgcagggcacgttgaacatgcagggcacgcgcttcgtctcgttcaccgctcagccgtagcggtcacttcttcttgatgggcggctgtttcttttgccaggccagcagctcgaacacgccaaagataaagatcttggcctcttgccagtagctgatcggctgatccttcggctgggtggatttcaacagcaccagctgcaggccgtgcatcaccaccataaagaacagcgccacgtcgatgaaatacttcagcggcttgggaaacggatggaacaggttagagagcaggaagccccacacgcacagcatcagcaggcggcccagattaatcaacatggtcggttttctcttgcgaacgaatataaaggcgataggccacctggccggcgaccttctcccggtgcagctgccagctggcaggcacgtccgccgcggcgctttccgcctcggcttctacatagatccaggcctcgtcggccagccagccgcgttgctccagcaacagggcggtctccgccagcaggcctttgcgaaacggcggatcgaggaacaccacgtcgaacggttggccatcgcccgccagccagctcagcgcgttggtgttgataaccacccctttgccctgcagcagcgccagatttttttccagctgctgcgccaccggccgttcgaattcgagcagcgtggcgctgccggcatagcgcgacagcgcttccagccccaatgcgccgctgccggcgaaacagtcgaggcagcgcgcgccctgaatcaccggcgccagccagttgaacagggtttcgcgtacccgatcggtggtggggcgcagccccgggctgttcggcaccgggagtttgcgaccgcgccattggccgccgatgatgcggatctgtccggctgcggcctggggcggttttttggccgccgcccgtggcgagagtcttgtcataagcgttgtttggtttctttcgcggcgcggggccgccgaggttaacgaaaagttgtccctattctaccggtgacgggcgtcggggggaacggtaaaacgttgttgtctgatttcacgccggaaagcatgccggatgcgtgttgctgggcgagggaaagtgatagactcggcggattattgtcagcatatatccttcaggtatggagggtaagcgagccttcggtacggagtagagtcataacatggcaaaagataagaaacgtgggtttttctcctggctggggtttggccagaaggagaaggaagaagatcaacagcaacctgagccgtcggtagagcaggcggaacctcaggccgcggagacgccggctgaaccggtcaccgccaagctggacgacaagctccccgcccaggaatctgaacctgccgcctccgtcgacaccccgggagagtgggataacggtcaggccggcgagcaaatcgcggaaaatctgccggcagcggccgagcatccggcggcgcaagcgctggccgaagagatcgtcagcgtcaccgaacaggtggcggcgcagcagcaacctgttaccgaacccgagccggtcgtcgaacccgagccagtcatcgaacctgagccggtcgtcgaacccgagccggtcgttgagcctgagccggtcgttgagcctgagccggtcgtcgaacccgagccggtcatcgaacccgagctggtcgttgagccagagccggaagcggaagaagagccgctggaacccgtcgtgccggccgctgcgcaagagcaggagcgcccgaccaaagagggcttcttcgcgcgcctgaagcgcagcctgctgaagaccaagcagaacctcggctccggctttatggggctgttccgtggtaaaaagatcgacgacgacctgttcgatgagctggaagaacagctgctgatcgccgacgttggcgtggacaccacgcgcaagatcatcacctccctgacccagcacgccagccgcaagcagctgaaagacgccgaagcgctgtacggcaagctgaaggaggaaatgtccgaaattctggccaaggtcgatcagccgctggatgtcagcgggaaaaccccgtatgtcatcctgatggtcggcgtgaacggcgtgggtaaaaccaccaccatcggcaagctggcgcgtcaattccaggcggaaggcaagtcggtgatgctggcggcgggggacaccttccgcgccgcggcggtggaacagctgcaggtgtggggcgaacgcaaccgcattccggtggtggcgcagcataccggcgcggattccgcttcggtgatcttcgatgcggtgcaggccgccaaggcgcgcggcatcgatgtgttgatcgccgataccgccggccgtctgcagaacaaatcgcacctgatggaagagctgaagaagatcgtccgcgtcatgaaaaaactggacgaccaggccccccatgaggttatgctgacgctcgatgccagcaccggccagaatgccgtcagtcaggcgaaattatttaatgaggccgtgggcttaaccggcatcacgctgactaaactggacggtaccgccaagggcggggtgatcttcgccatcgccgatcagttcggtatcccgatccgctatatcggcgtcggggaaggcatcgaagatttgcggccgtttaaggctgacgattttattgaggcactttttgcccgagaggattaatacggatgattcgctttgaacaggtcagtaaagcttatctgggcggacggcaagcgctgcagggggttgatttccatctgcgcccggcggagatggcgtttctgaccggccattccggcgcggggaaaagtaccctgctgaaactgatttgcggtatcgaacggcccagcgccggccacatctggtttggcggccacgacatcagccgtttgaaaaaccgcgaggtgccgttcctgcgccggcagatcggcatgatcttccaggatcaccacctgctgctggatcgcacggtgtatgacaacgtggcgatgccgctgatcatcgccggcgccagcaccgaagatatccgccgccgcgtttccgccgcgctggacaaggtcggtctgctggataaagcgaagaacttcccgattcagctgtccggcggtgagcagcagcgtgtgggcatcgcccgtgcggtggtgaacaagccggcggtgctgctggcggatgaaccgaccggtaacctggacgatgcgctgtcggaaggcattttgcgcctgtttgaagaattcaaccgcgtcggcgtgaccgttctgatggcgacgcacgacaccgggcttatcgcccgccgcaattaccgcatcctgacgctgagccagggccgcatgcaaggaggcgctcaccatggccaataacgcaaaaaccgccaagagcaaggcgctgcgcggcggctggcgcgaacagtggcgttacgcctggatgaacgccatcaaagacatgctgcgtcagccgttggcgacgctgctgacggtgatggtgatcgccatttccctgacgctgccgagcgtgtgctacatcgtgtggaaaaacgtcagcaccgcggccagccagtggtatccgacgccgcagctgaccgtctatctggataaatcgctcgatgacgacgcggcgctgaaagtgctcgacgccatcaaggcggaagccggcgtggagaaggtgaactacctgtcgcgtgaagaagcgcgcggcgagttccgcaactggtcgggctttggcggcgcgctggacatgctggaagagaacccgctgccggcggtggcgatcgtcacgccgaagctgagcttccagagttcggacaccctcaacaccctgcgcgatcgcgtggcggcggtacagggcgtcgaagaagtgcgtatggatgacagctggtttgcccgcctggcggcgctgaccgggctggcgggccagattgcggcgatcatcggcgtgctgatgatcgtggcggtgttcctggtgatcggcaacagcgtgcgtctgagcatcttcagccgccgcgacaccatcaacgtgatgaaactgatcggcgccaccgacggttttatcctgcggccgttcctcaacggcggggcgatgctgggctttgccggcgcgctgctgtcgctggtgttgtccggggcgctggtatggcaactggagtcggtggtcgccggcgtggccaaggtattcggcaccaccttcaccctacacgggctgggttgggatgaggcgctgctgctgctgatcatctccgcgatgatcggttggatcgccgcctggctggcgacggtgcaacatttacgccgatttacaccacagtaagatttttttggtatactcttctcctgctgcttttgatcgcgttgcgggagaagagtgacctcaagcgaagtcagcaccatccctctcttcttagcgcacaaattccctatcggcctgcaccttcgtcacgtattgtcagcaacaatgcttgcaaaaaagggtgaacttctggggcggaatacggtcaaaaattgcagcaaatgttaaggtgcccggcgtgtggaaccgcttttgcttcagcaactgccgtagaatcaatcatttccccgctgtaataatcacctgcatgattttgtattctcatagagagggtttgaatgaccaaagaaatgcaaactttagccttagtaccccaaggtagcttggaagcctatatccgggcagccaacgcctatccgatgctgacggcagaggaagagcgggagctggctgaacggctgcattatcagggcgatctggatgccgctaagcagctcatcctgtctcacctgcgctttgtcgctcatattgcccgcaactattcaggctatggtctgccgcaggcggatctgattcaggaaggcaatatcggcctgatgaaagccgttcgccgcttcaaccctgaagtcggcgtgcgtctggtttcctttgcggtgcattggattaaggcggaaatccacgagtacgtattgcgcaactggcgcatcgtgaaagtggcgaccaccaaagcgcagcgcaagctgttctttaacctgcgcaaaaccaaacagcgtttgggctggttcaaccaggacgaagtggaactggtggcccgtgagctgggcgtaaccagcaaagacgtgcgcgagatggaatcgcgcatggcggcgcaggacatgacgttcgatccgactccggacgacgaggcccgcgacggccagtcgatggcgccggtgctgtacctgcaggacaagagctcggacttcgccgaaggcatcgaggaagataactgggaaagcaacgccgcagacaaactggcctatgcgctggaaggtctggacgagcgcagccagcatatcattcgcgcccgttggctggacgacgacaacaagtcgacgctgcaggagctggccgatcagtacggcgtttccgccgaacgcgtgcgccagctggaaaagaacgccatgaagaaactgaaaatggcgatcgaagcctgagtcgatgcgagattcgataaaaaaagcccggcaagccgggctttttagtgcctgaaatccggcgctatggcgccacggcggcaaagtctggcgccgggcagtcgtagccgaatttcgccgcccacgggtagcgggtgccagtgttgatgtagcgctgataaagcgcccggccggttttggcatcacgcttgataacccagctggcagcgttacacaacacggcggcataggcctggctcttcggcggcagcagatcggccgcctgttgcgccagccccaccgcctgccagcgatagtgcaggaaacggttgtcttcctccggtagcgccgccttggcgcgcgccgcttctgcgctgtcgatccagcttttatgcttcagctcgcgagtatcgaacgcatcccccagataggaatagccggcgccatagatggcgtaatccggcgtcatctcatacccggtaaactccagcccctgggcgcgcagcaggttggcggcgcgatagtaagcctgcgcgcgcgccagcggtgcggcggatttgtccttggcggccttcagctcgtcggcgtactgctgcgccgcctgccggtagttggggatatcgaagtaggccagcgcctccggcgctcgtccggcgcgcatcagccgccgcgccagcagttcgcgcagctgcacttccggcgtgatctgctggccgccgtagtcgtccggattaaccggcttgagcggcgtcgtcggcgccggggcgtgcttatcgacaaaacctttcaactcatcgacggtcagcacccgctccgccacgtcggccacgtcggcccagtagagcgctttgccgcgatacagcaggtccatcgcctgcagatagtcgccgcggttcagcgccaggatggcctgttcgccggccacccggcattcgggcacgatggtttccgcaacaaagtcggcgttgcgttgctcgccccagctttcgtcggcggggaacgcgcttgccgccttggcgtaggcggcggtggcggctttcacgtcgccgtcgcgcagcgccattttcgcgcgcagccaccacgccaggccgctgtcgccggcgtttttcagcaggctcgccgccatcgggtactgccccgaacggtaagccaacgccgccagccgatcgctgccggcgaagccgcttttcactgagccgtccagcagcgtcaggatctggctgatgatctgggcggagcggccgttgccgtcggtatccgccatttgcaggttgccgctgcgcgcgaacagctcaatggtcaccaactgctggatcaacggatcgccgataatctgtttcagcgtgtccaaatggtcggggttgaccaggaggctggagacgtactgcagcgactgcccgccgctcggatcgccctgcgccgcctgctgtgcgtacaggtgggcggcgggggcgacctcacccagccacaggtggatgcgcgcctgctgcccaaggctgctcagcgccagctgatcgggatcggtggcgccgtttttcacccgatcgatcacctgctggaatgccgtcagcgcctgttcaagttcggctttaggcggatgctcggcggcgggaaccgcttcaccggattcattcaccggtgtaccgtggtcagccatcaggacgcggccaagcgaatactgcgcccgcagtccccagtcgccctgctcggcggccggtagcttcagcacctgctggaaatagtctgcggcgcgcggatcgtggctggcgaaagccacggcgcccagttgatagagacgcgcagcgttggacaacccttgcgtattgacggcgtcagcctcttccaccgttttggcggcgcgcattttgccgatcgctatcgtttccggcgattgcggcatcggtttcggcggcatcggcggcggcggggcctgccagtgcggcaactgactgtccgccggcaccagccggccggcttcgaaggcgaaattgccctccggcatatacagcagggtgccgttgcgatcgatcagcagccggttaggaaaatccgggccgcaggcatagccgcccagcggcagtgcggcgccgatcagcatggccagcggaagaaggcggcgggtgttccgtgccgcgcgcgaatcaaggtgtgacaagggtgcctcctggcgtcagttgttggcagcgcagccagcccaacggccgggattgcccggcgcgcagctggtcgctgctgatgcgaataaagcgttgccgttgcggtgcggattccagccggtagttgccgaccgcgtccgccgccaggcagtcgtcggcgcggatgagcacctcttgcggcagcggggcgtccaccggcccgttgttatgaattatcagatcatacagcccgttttgctgtggctgaggcctaaattttacctgccagtcgacattcagcggccgccgttcgatcaccgctcgcagcgtggcgagcgaccaggcgcgccgatcgtccgccagtggcaagcggaaccagataatgccgcgcagccggggcggcgtttgctgcgccagcgtttgcagaaaatcggcgatctgctgcggcgcgaccgtcagttcgcggccgttgcccgccatgcgcagcgaggattcgctctccacctgcgcgccctgcgcatcaaaacccagcagtgccatgccataagccggcagcgcgacgcgaaacggcttcggtgtgacggcggcgtactgccgcacccagcgtagcgccaaggggccgtcaaacagcccctgctgcggcgagagcaccgcgtgcacctgcaggacggagctgtcggcctgttgcagtacgccgggcaggtcgggcgagccgatccaggccggcagggcggtgatgccgagttgcaaagcggcgggcagccgttggcgcagccgctgcagaaagcgttggtagtccggcaggcgggcggtggcggcatcatgatcgatctcgacgccggtgacgggcagcccggccgcctgccagcgctgggtgagcgccagcagccgctggataatggcctcttgatccagctgcggcagctggccgtcgaggcgggccaccagccagagtgggcggccgtcctgcttcagcaggctgagatcggccgggatttcccgccagccttcacgcggatgcacctgcagcgccagcacccgcagcttggcgaacagatcgcggctgctcgccagcgcatcggcgtgctgcggcgtccaaactcgctgccagacataaacctgctgatcccagtctgaggccaggcgcagcgcctgctggcgcccgaggaacgcggccgccagccccagcgcaatcaagaccagcgccgccaaccggcgtttcatttttgccagagatcgccctgcggtgcgaagccgcaggcgcgcatgaagttctcgacttccccacgttcgcgcggtgccaggccggcggtcgacagctgccagtgagcgacctgcggcagctgacgctgcgcatcctgtaccaggtaaagaccgacgccgcggcggcgcgtcacttcgcgcaccagcaagtcctgcagctcggcgcggtcatcctgcagcgcaattttcactgcgcccagcagacgctcgttgaagcgggcggcgaacagcgccttgccgccgctcaaccagctctgccactgttccggctgctgatgcggccaaattttaccgagatcgataaggtcttgcggggacagcgcggtcaggcgctcgatggtcagtttcatgcagaatttccgcgcagctaaatgatgccgacagtgtaatagatcttgtgcagagcgttgtgtaagtttttctgtacgattactgtgcaatatgttttttgcacggggcattttccgagtaaatagttagtaaaggggttgttaaccagcacaacgcgctacgcctaaaggtaaacggcgcagatttaattcgaattttatcctgtttacaccgcttgtttctgcctgatgaagttgatttgcagcagaaaattcctgtttaatggcatgaaaaataaagtcttattagaaaataatgccaacaaagcgcctaaatcattattacttataacaaaagcggtcaataacgatcgggcgcaggcaaacacaacaggtacgttcacaacgacagatggggatttgcggatgaaattaacaacaggtaaggcactgctggcgggttgcattgcgatggccatgagccaggcggctatggcgaaagacatcaaggtggcgatcgtcggggcgatgtccggcccggtcgcgcagtatggcgacatggagtttaccggcgcgcgccaggcgattgccgacatcaacgccaagggcggcatcaagggcgacaagctggttggcgtggaatacgacgacgcctgcgatccgaaacaggcggttgcggtcgccaacaaggtgatcaacgacggcattcgctacgtgattggccacctgtgttcctcttccacccagccggcgtccgatatctatgaagacgaaggcgtgatcatgattaccccggcggccaccaacgccgatctgactactcgcggctacaagatgatcctgcgcaccaccggtctggattcggatcagggcccgaccgccgccaaatacatcctcagcgacatcaagccgaagcgcatcgccgtggtgcacgataagcagcaatacggcgaaggcctggcgcgctcggtgcgcgacagcctgaaaaaacagggtaccgaagtggcgatgttcgaaggcatcaccgccggcgacaaagacttctccaccctggtggcgcgcctgaagaaagagaatatcgacttcgtgtacttcggcggttactacccggaaatgggccagatcctgcgtcaggccaaacaggccgggttgaccacccgcttcatggggccggaaggcgtgggtaactcctcgctgtccaacatcgccggcgccgcctcggaaggcatgctggtgacgctgccgaaacgctacgatcaggtgcccgccaaccagccgatcgtcgatgcgctgaaagccaagaagctggatccgaccggcccgttcgtctggactacctatgccgcgctgcagtcgctgaccaccggcatggagcgcagcggcagccaggagccggcggacatcgtcaaggatctgaaaaccggcaagccggtggacaccgtgatggggccgctgagctgggatgacaagggcgacctgaaaggcttcgagttcggcgtgttcgagtggcatgccaacggcacgtccacaccgatcaaataagccataatgattagggtggggcgcagtttgctgcgcccggcgagtcggcttgccggccccgtctccctttacccgccggttctccgccggcgggtttcgcagccaagggttcagagtatgtcagagcagctcctctattttctgcagcagatgttcaacggcttaacgttgggcagcacctatgcattgatcgccatcggttacaccatggtttacggcatcatcggcatgatcaacttcgcccacggcgaggtgtacatgatcggcagctatgtctcctttatcgttatcgccgccctgatgatgctcggcatcgacgtcggctggctgctgatcggcgccgcgttcctggtctcgatcgtcatcgccagtgcctacggctggagcatcgagcgggtagcctacaaaccggtgcgcaactccaagcgcctgattgcgctgatctcggccatcggcatgtcgatattcctgcaaaactacgtcagcctgacgcagggctcacgcgatctggcgctgcccagcctggtgaccggccagtgggtgctgggggaaagcaacggcttcgccgccaccatcagcaccatgcagctgaccatctggctcgtgaccttcctggcgatgctggcgctgacgctgtttatccgctattcacgcatgggccgcgcctgccgcgcctgcgcggaagatctgaagatggccagcctgctgggcatcaacaccgaccgggtgatctcgctgaccttcgtcatcggtgcggtgatggcggcggtggccggggtgttgctcggccagttctacggcgtcatcaacccttacatcggctttatggccggtatgaaagcctttaccgctgcggtcctgggcggcatcggcagcattcccggcgcgatgatcggcggcctggtgctgggcgtggcggaagcgctgacctccgcttatttgagcaccgaatacaaagacgtggtgtcgttcgcgttgctgatcgtggtgctgctgatcatgccgaccggcattcttgggcgtccggaggttgagaaagtatgaaactcaatctgcttaatgcgctgatcgccacggcggtgctgttcgtgatggcgtcgttcctgatgggcatgcagctcagcctggacggcaccaaactggtggtgcacggcgcggcggaagtgcgctggatgtggatcggcatcggctgcgtcatcgtcttttttttccagctgttgcgcccgctgctgctgcagggcctgaaaaaggtctccggcccggcgttcgtgctgccgagcttcgacggcaccacgccgcggcaaaagctgctggcggctctgctcatcgtcgcggcggtcgcctggccgttcctggtgtcgcgcggcacggtggatatcgccaccctgacgctgatctacgtgatgctgggcctcggcctcaacgtggtggtgggtttgtccggtctgctggtgctgggctacggcggtttctacgccatcggcgcctacacctacgcgctgctgaatcattattacggtttcggattttgggagagcctgccgctggcgggtatcgtcaccgccgccttcggcttcctgctcggtttcccggtgctgcggctgcgcggcgactacctggcgatcgtgacgctcggcttcggcgagatcgtgcgcatcctgctgctgaacaataccgagatcaccggcgggccgaacggcatcagccagatcccgaaaccgacctttttcggcctggaatttaaccgcagcgtgcgcgacggcggttgggataccttccataacttcttcggcctgaaatacgatccgagcgatcgcatcgtgttcctgtacctggtggcgctgctgctggtggtgctgacgctgttcgtcatcaaccgcctgctgcgcatgccgctcgggcgcgcctgggaagcgctgcgtgaagacgagatcgcctgccgctcgcttggcctcagcccgacgcgcatcaagctgaccgcctttaccatcagcgccgccttcgccgggtttgccggcacgctgttcgccgcgcgccagggtttcgtcagcccggaatccttcaccttcgtcgagtcggccttcgtattggcgatcgtggtgttggggggcatgggctcgcagttcgcggtcattctggcggcgatcctgctggtggtatcgcgcgagctgatgcgcgatctgaatgaatacagcatgttgctgctgggtgcgctgatggtgctgatgatgatttggcggccgcaggggctgttgccgatgaaacggccgcagctgaagctgcaggcggcggatattcacgcgggcaagggggaacaggcatgagcgttcaacctttacttcaggtggaaggcctgtcgatgcgtttcggcgggctgctggcggtcaacaatgtggcgttgacgctcaatgaaggcgaaatcgtgtcgctgatcggccccaacggcgccggtaaaaccacggtattcaactgcctgaccggtttttaccgcccgagcggcggcaccatcaaattgcgcgatcgccatctggaagggctggcggggcaggccatcgcccgtatgggcgtggtacgcaccttccagcatgtgcggctgttccgtgaaatgacggtgattgagaacctgctggtggcgcagcatcagcacctgaaaagcggcgtgttcgccgggttgctgaaaaccccggccttccgccgcgccgaagccgaagcgctggcgcgcgcggcagagtggctggagcgcgtcggcctgctatcgatggccaaccgttcggcgggcaacctggcctacgggcagcagcgtcggctggagatcgcccgctgcatggtgacccggccggagctgctgatgctggacgaaccggccgccggcctcaacccgaaagagaccgacgagctggatcatctgatcgtcgagctgcgcgatcggcataaggtctcggtgctgcttatcgagcacgacatgaagctggtgatgggcatttccgatcgcatttacgtggtgaatcagggcacgccgctggcgcagggcacaccggcggagatccgtaacaacccggacgtgatccgggcttatttgggcgaagaataatatgttgtcattcaatcaggtatccgcccattacggcaaaattcaggcgttgcatcaggtcagtctcacgataagtcagggcgaaatcgtgacgttaatcggcgccaacggcgccggtaaaaccacgctgctcggcaccctgtgcggcgaaccgcgcgccagcgaaggcagcatcgtctttcagggccaggacatcacccagtggcaaacctcgcgcatcatgcgtgaagcggtggcgatcgtaccggaagggcggcgcgtcttctcgcgcatgacggtggaagaaaacctggcgatgggcggcttcttcgccgatcgtcaccagtatcaacagcgcatcgaacgggttttcacgctgttcccgcgcctgctggagcgccgaagccagcgcgccggcaccatgtccggcggcgaacagcaaatgctggccatcggccgcgcgctgatgagccagccgaagctgctgctgctcgacgaaccttcgcttgggctggcgcccatcattatccagcagattttcgacatcattcagcagctgcgggaagagggcatgaccatcttcctggtggagcaaaacgccaatcaggcgctgaaattggcggaccgcggttatgtgctggaaaacggccgcgtggtgttggaagatacgggggctgcattgttagccaacgaagcagtgaggtcggcgtatctgggcggttaatccgcccccctacgaattaaaataatcaggtacgagaagaagaaatgaagacagaagggttactcgcgcagcgcatcgttaacgtaaaaagttcggccatccgtgaattgcttaagcacagcaagatggaacacgtcatttcgctggcgggcggcatcccctctgatgcgctgttcgatttcgaaggattgagcattgccacccagcaggcgatcaccgaacagccgaaaagcgcgttccagtatggcctgaccgagggcagcccgctgctgcgtgagcgcatctgcgcgctgtgcgccgagcgcggcgtcaccgcgcgcgcggaagaggtgatggtcaccgccggctctcagcaggcattggatttggtgatgcgcgccatcgtcaacccgggcgacgtgttcgtggtggaacgcccgacctacctggcggcgctgcaaacgctggaactggcggaagccaacatcatgtcggtctcgtccgacagcgacggcatggtggtggaagagctggccgagctgctgaaaacccagcgtatcaagggcgtgtacgtggtgccgaacttcggcaacccgagcggcatcaccctgagcgccgcgcgccgcgaactgctggtgaagctggccgccgaacataacttcctgatcatcgaagacgatccgtacggcgagctgcgtttcaccgaagagcgccacccgacgctgcatcaggtgtcgcagcgggtgctgggcaataccgaccacatcatctatacctcgaccttctccaagatcctggcgccgggcctgcgcctgggttgggcgatcctgccgccgttcctgctgcataaagtggcgatcatcaaacaggcggcggatctgcacgccagcgccctgtcgcagagcatcgtcgaatgctacctcggcctggatcgcctgccggcccagatcgacaagatccgcgccgcctacaaacagaagggcgagatcctggccggtttggtggagcaggagctgggcgactacatcaccttcgataaaccgaagggcggcatgttcctgtgggcgcgtttccgccagccgttcaacgccaccgaatggctgaacaccacgctgcagcagggcgtagtgttcgtgccgggggaatacttcttctccgacaacccggatcgttcgaccttccgcctgtcgttcgccactgccaccgagcagcagatgcaagaagcggtggcgcgcctgcgccgttcgctataagcctcgcggcggcggagccgatgcccgccgccgacatcaaaccgccatcttcacttcaccttgccgtcatgtggctgtcatctaacggttatttttctgtcatccgcgcatggcatgttagcttccgaacaaaaaactgattcttttcgctcacgcgcttttacaccagctttttcaggagttaggcatgctcacctacgctattcgcaaaaccacgctgtgcgtcgcattgaccctggcggtcagcgcccaggcgctggcggcgacagaaatcccgttctggcattcgatggaaggcgaactgggtaaagaagtggactctctggcggatcgcttcaaccagtcgcacagcgacgtcaagattgtgccggtttataaaggcaactacgaacagagcctggcggcgggcatcgccgcttaccgctccggcaaggcgccggcgatcttgcaggtttacgaagtgggcaccgccaccatgatggccagcaaagccatcaagccggtctacgaagtgtttaaagaggccggcatcaacttcgacgaatcggtgttcgtgccgacggtggccggctattacaccgacaacaagagcgggcatctgctgtcgcagccgttcaacagctccacgccggtgctgtactacaacaaagacgccttcaaaaaggccggcctgaacccggatcaaccgccgaaaacctggcaggaactggcggcggataccgccaagctgcgcgaagccggcatgaagtgcggttacgccagcggctggcagggttggatccaactggagaacttcagcgcctggcacggcgtgccgtttgccagtgaaaacaacggtttcggcggcaccagtgccaagctggagttcaaccaaccgctgcaggtcaagcatatcgcgctgctcgaagcgatgaacaagaagggtgatttcacctacttcggccgcaaagacgaatccaccgagaagttctacaacggcgattgcgccatcaccaccgcctcttccggttcgctggcggacatcaagcactacgccaaattcaactacggcgtcggcatgatgccgtacgacgctgacgcgaaaaatgcgccgcagaacgccatcattggcggggccagcctgtgggtgatgaacggcaaagacgccgccacctacaagggcgtggccgagttcctgcagtacctggcgcaaccggaaatcgccgccgaatggcaccagaagaccggctatctgccgatcaccaccgcggcttacgatctgaccaagcagcagggcttctacgacaagaacccgggtgccgacgtcgccactcgccagatgttgaacaagccgccgttgccgttcaccaagggcctgcgcctgggcaacatgccgcagatccgcagcgtggtggatgaggagctggaaggcgtgtggaccggcaagaaaacgccgcagcaggcgttggacgccgccgtgcagcgcggtgacgtgctgctgcgtcgcttcgaagcatcaaccaaataaccctgcgtcgcgggcccggcggaccgggcccgcgtcttcacgccgatccttccgtgcccgattaatggtttaactgctatgtcatcttcccgtcccggtttcggctgcagctggttgccctatgcgctggtgctgccgcagctgctgattaccgccgtcttctttttatggcccgccggcgaggcgctgtggtattcggtgcagagcctcgatccgttcggcctgtccagccagtttgtcgggctggataactttaagcagctgttccaggatccttactatctcgactcgttctacaccacgctgatcttcagcttcctggtggcgggcatcgggctggcggtctcgctgtttttcgccgcgttggtggactacgtgctgcgcggcagccgcctctaccgcacgctgatgatcctgccctatgcggtggcgccggcagtggcggcggtgctgtggatttttctgttcaaccccggtctcgggttgatcacccacttcctcaatgggctgggctataactggaaccatgcgcaaaacagcggccaggcgatgttcctggtggtgctggcctcggtatggcagcagataagctataacttcctgtttttcctcgccgcgttgcagtcgatcccgcgttcgctggtggaggcggcggccatcgacggcgccggcccggtacgccgcttcttccatctggtgctgccgctgatcgcgccggtgagcttcttcctgctggtggtcaatctggtgtacgccttcttcgataccttcccggtgatcgacgccgccaccggcggcgggccggtgcagtccaccaccacgttgatctacaagatctaccgcgaaggcttcgccggattggatctctccagctccgccgcgcagtcggtgatcctgatgctgctggtgatcggcctgacggtgatccagttccgcttcgttgaacgtaaggtgcgctaccaatgattgagaatcgacgcgggctggacatcttcagccatgtgatgctgattatcggcgtgctggtggtgctgttcccgctgtacgtggcctttgtcgccgccacgctggacgacaaacaggtgtttcaggtgccgatgacgctggtgcccggcggccacctgtgggagaacatccgcaatatctggcagggcggcgtgggcaacctcaaggtgccgttctcgctgctgttgctcaacagcgtgatcatggcgctggcgatcacctgcggcaaaatcgcggtgtcggtgctgtcggcttacgccatcgtgtacttccgctttccgctgcgcagcctgttcttctggctgattttcctcaccctgatgctgccggtggaagtgcgtattttcccgacggtggaggtgatctccaacctcaacctgctggacagctataccggcctgacgctgccgctgatggcctcggctaccgccactttcctgctgcgccagttcttcatgacgctgccggatgagctgctggaggcggcgcgcatcgacggcgccgggccgatgcgtttcttctgggacatcgtgttgccgctgtcgaaaaccaatctggcggcgctgttcgtcatcacctttatctacggctggaaccaatacctgtggccgatcctgatcaccagcgacgcctcgatgggcaccgcggtagcgggcatcaagagcatgatctccacttccggcgcgccgacccagtggaaccaggtgatggcggcgatgattctgactttattgccaccgctggcggtggtgcttctgatgcagcgctggtttgtgcgcggtctggttgatagcgagaaataacgacgatggcaggattaaaactacaggcggtcaccaagtcttacgacggtaaaacgccggtgatcaaacagatcgatctcgatgtggcggacggtgagttcatcgtgatggtcggcccgtccggctgcggcaagtccacgctgctgcggatggtggccgggctggaacgcaccaccagcggcgatatttatatcgatacccggcgcgtgaccgatctggagcccaaggatcgcggcatcgcgatggtgtttcagaactacgcgctctatccgcacatgagcgtatacgacaacatggcctacggcctcaagatccgcggttttggcaaggagcatatccgccagcgggtggaggaggcggcgcgcattctggagctggagccgctgctcaagcgtaaaccgcgcgagctatccggcggccagcgtcagcgcgtggcgatggggcgcgccatcgtgcgcgaaccggcggtgttcctgttcgatgaacccttgtccaacctggacgccaaactgcgggtgcagatgcgcctggagctgcaacagctgcaccgacgcctgaaaaccaccagcctgtacgtgacccacgatcaggtggaggcgatgacgctggcgcagcgggtgatcgtgatgaataagggcgtggcggaacagatcggcacgccgagcgaagtgtaccaacggccggcttcgctgttcgtcgccggctttatcggctcgccggcgatgaatttgctgcccggcaccctgagtgccgacggtagccagctgctgctggcggacggcatggcgctgccgttgcctgcggccaaaccgcagtgggcggggcggccgttgacgctgggcattcggccggagcatattcaattggtggcgcaaggccagggcgtgccgttgcagttgcagacgctggaactgctgggagccgacaatctggcgcacggccagtggggcggtcacggggtgatcgcgcggctgtcgcatgaaaccttgccgacggcgggcagtacgctatatttgcagctgcctgctcaggcgctgcacttctttgacacccacagcggattacggatggattgatgacgagaccctggccttaccctcatatcgttgcccaccgcggcggcggttctctggcgccggaaaataccctggcggcgatcgacgtcggcgcgcgccacggccacaagatgatcgagttcgacgccaaactggcgcaggacggacaaattttcctgctgcatgatgatacgctggatcgcaccagcaacggctggggcgtggcgggcgagctgccgtgggataagctggtgcagctggacgccggcaactggtacagctcggccttcaagggcgagcggctgccgctgctgtcggaggtggcggaacgctgccgggaacacggcctgatggccaatatcgagatcaaaccgaccaccggcagcgacgacgaaaccggccgggtggtggcgctggcggcgcggctgctgtggcaagggcagaccgacccgttgctctcctccttctcggtggaagcgctggcggcggcgcaacgcaccgtgccggatttgccgcgcggcttgctgctggaggactgggacgacaactggcgcgagctgaccgaacgtctggactgcgtctcgctgcatatcgaccacaaggcgctgaccgccgagcgggtgaaagcgttgaaagacgccggtctgcgcattctggtgtacaccgttaaccagcctgatcgcgcgcgcctgctgctcgactggggcgttgactgcatttgcaccgaccggatagatttgattggcccggagttctaatccggcgccgatgaatcctgcgacgacaagccttgccgccgcaccaccggaaggaatgcgatgcctggctttatcctgtcactgtggcaccagatggtgctgtcattaccgctgttcgtcctgatcgcgttgggttatgggctgattcgctgggggaaatggcccgccagcatcaccgatggcctgacgcgctttgtgttttccctcgccttgcccgccatgctgtttcgcatgatgtgcgacttctcgcagcgtccggcggtcgatgcccggctgttgatcgcgttcttcggcagttgcctgatcgtgttcgtgctcggccgcctggttgcccggtaccttttccggctggatggcgtcgccgggtcggtgtttgcgctgggcggtattttctccaataacgtgatgctcggtttaccgatcgccagcgtgatgctggggcaggcggcgatcccgtcggtggcgctggtgctggtgttcaacggcctgatcctgtggacgctggtcacggtgtcgatcgaatgggcgcgcaacggctcgccgacgctggggggctttgctaaaaccgcgcgcagcgtgctgaccaacccgctgatcgtcggcattttgtccggcacgctgtttagcctgaccggcctgccgctgccggacttcgtcgatcggccggtcagcatgctcggccaggtggcggcgccgctgtcgctggtggtgcttggcatggggctcgccgagtaccgcatcagcgaaggctggcaactgagcagcgccatctgcgtgctgaagttgctggtacagccgttggtgatttggctgctggcctggatgatggatctgccgccgatggagacccgcgtggtggtgctgctgggctcaatggcggtgggggtgaatgtctacctgatgtcgcgtcagttcaatacgctcaccggcccggccgccaccagcctggtgatgtccaccgtgctggcggcgatcaccacgccgctgatcctcaccgttatgggcgtgcgggcgtagccggcagcggggcctgcggcaccgccggcgcggtacggttgaacggatcgcgcggctggttgccgttaggcagcagctggccgccgttcggcgtggtttgcaacagctgttgccgttgattgtcgaactgtcgctgttgttgcaggcggcgttgatccatctgccggttgttcaacaagcgctgttgctgcgcctgttggctgttttggttgagaagccgctgctgtgaacgcagatcggttacgccgttggccgctgcagccaggccgggcagcaacagcagagcgaacaggatgtgagacgttttcatgatggttacctcgcttttttattaagcctaacccagcggtgaaattttgctggtagtttgtattttgttcaaatgtaaaccgccttttcgccaacgcggtgcccatcttccgttacaatcgcggtttatgaattgctaggatgaacccatcgtgctgctcttggttatcaccaccattctgtgggcgttttcttttagcctgatcggcgagtatttggcgggtcaggtcgacagcgggttttcggcgctggtgcgcatcgggctggcggcgctggtgttcctgccgttcctgcgctggcgcaatatcaagcccagggtgatcctgctgtatatgctggtgggcgccttccaactgggcatcatgtatctgttcagcttccgcgcctatctctacctgacggtacccgaattcctgctgttcaccgtgttgacgccgctgtacatcacgctgatctacgacttactgagcggccgacgtttacgctggggctatgtgttcagcgcgctgctggcggtgctgggcgcggcgatcattcgctatcaccaactgagcgaacacttctggtgggggctgctgttggtgcaggcggcgaacatcagcttcgccatcggcatggtcggctataagcgcctgatggaagtgcaccccttgccgcagcacaccgccttttcctggttctacctgggggcggcggtggtggcggtggtggcctggttcctgtggggcaatccgcagcagctgccgacgaccaatctgcagtggggcgtgctgatctggctgggcgtggtggcgtcggggctgggctatttcatgtggaactacggcgcgacgcaggtggatgccggcacgctcggcatcatgaacaacatgcatgtgccggccggcttgttggtcaaccttgccatctggcagcaacagccgcactggccgagctttatcatcggcggggcggtgatcgtcgcttcgctgtgggtgcaccgccgctgggtggcgccgaaacagctcggctaaacgggagggcgacagtttatacgccggccgccaacgctttggcgccggtcgcgccggggcgtgccgcgtcgcgcacgaacggcagatgatcgcaggcgtgctggcgggccgagcggataaaggcttcggtcaccgcctggcgctgttcgccgtcgcgcacggcggcgtacaggcggctccacaggccgtcacccagggttttggtcaccaccagcccctgccgttcgaaactctccaccacccaatgcggcagcgccgcaatccccatccgcgccgagaccatctggatcagcagcagcgtgttatcgacgttcttcaacgccgggttgacgcccgccggctgcaggaaatgccgccagatatccagccgctggcgctgcaccgggtaaatcaacagcgtttcatcgctcaagtctgccggctcgatgtgcggcttgccggccagcggatgatccggcgccagcaccagacgcacctcgaaatcgaacatcggcgaatagtgcaggccgctgcgcggcagaatatccgacgtcatcaccagatccagctcgccctgttgcagggccggctgcggatcgaaagtcacgccggaggtgaagtccatcaccacctgcgggaaacgctggcggaaattgtccagcgccggcgtcagccactgaatgcagctgtggcattcgatggcgatgcgcagcgtggtctggtgcggctcgtggcaggcctgcagcgcctgtgagatttgcggcagcacctgttccgccagctgcagcaagatctcgccctgggcggtgaagcgcagcggctggctcttgcgcacgaacagcttgaagcccagacgttgctcaagatcgctgaactggtgcgacagggcagactgcgtctgatgaagttgggccgccgcccccgccagcgaaccgctgctgcgcagggcctgcagcgtccgtaaatgtttcagttcgatcatgagagtccttcacattgacagtgaataaattgcgcttgtggttaatacagtacctgctgattatggatgtgtaaacatctggacggctaaatggggaataagacgatggcaattttgaatcacacactgggttttcctcgcgttgggctacgacgtgagctgaaaaaagctcaggaaagctactgggctggcaactcaacgcaggaagagctgttggcggttggccgcgagctgcgcgctcgccattggcaacagcaacagcaggccggggtggatttggtgccggtcggcgatttcgcctggtacgatcatgtgttgaccaccagcctgctgctgggcaacgtgccggcgcgccatcagaatgcggatggctcgatcgatctggacacgctgttccgcatcggccgtggccgcgcaccgaccggcgagccggcggccgcggcggaaatgaccaaatggttcaacaccaactaccactacatggtgcccgagttccaacaaggccagcagttcaagctgggctggacccaactgctggatgaagtggacgaagcgctggcgctggggcatcacatcaagccggtgctgctgggcccggtgacctatctgtggctgggtaaagtgaagggcgagccgttcgatcgcctgtcgctgctgaaagacattctgccggtttaccagcaggtgctggccgaactggcgaaacgcggcgtcgagtgggtgcaaattgacgagcctgcgctggtgctggagctgccgcaggcctggctggacgcctttaaaccggcttacgaagcgctgcaggggcaggttaagctgttgttgaccacgtatttcgacagcgtcggccacaacctcgatacggttcgcacgctgccggtgcaggggctgcacgtcgatctggtcgccggtcacgacgatatcgccgcgctgagcgccgcattgccgcaagactggctgctgtcgctgggcgtgatcaacggccgcaacgtttggcgcgccgatctgagccgctggttcgaacgtcttcagccgctggtgggcacccgcccactgtggatcggcagctcctgttcactgctgcacagcccgatcgacctgagcgtggaaagccgtctggatgaagaagtgaaaagctggttcgccttcgcgctgcaaaaatgcgccgagttggcgctgctggctgcggcgctgaacgcgcctgacgcggcgaagcaggccgaactggacgcctacagcgcaccgatccgcgcccgccgtcagtcgagccgtgtgcataacccacaggttgagcgccgtctggccgctatcaccgcgcaggacagcgagcgccacagcgcttacgccgagcgcgccagggcgcagcgcgaacgtttcaacctaccggcctggccgaccaccaccatcggttcgttcccgcagaccaccgagatccgcggcctgcgcctggatttcaaacagggccgtttggacggcagcaactaccgcaccagcattggagagcacatcaaacaggcgatcgtcgagcaggagcgcctcgggctggacgtgctggtgcacggtgaagccgagcgcaacgacatggtggaatatttcggcgagaacctcgacggcttcgtgtttacccagaatggctgggtgcagagctacggctcccgctgcgtgaagccgccggtgatcatcggtgacgtcagccgcccggaagccatcaccgtcgaatgggccaaattcgcccagtcgctgaccgacaagccggtaaaaggcatgttgaccgggccggtcaccatcctgtgctggtcgttcccgcgtgaagacgtgacccgcgaagtgattgccaagcagattgcgctggcgctgcgcgacgaggtggaagatctggaaaaagccggtatcggcatcattcagatcgacgaacccgccctgcgcgaggggctgccgctgcgccaatccgactgggccgcctacctgaactgggcggtggacgccttcaaattgaacgccgccgtggcgcaggatgacacccagatccacacccacatgtgttactgcgagttcaacgacatcatggactccatcgccgcgctggacgccgacgtgatcaccatcgagacctcgcgttccgatatggatctgctggaagccttcaaagagttcgaatacccgaacgaaatcgggccgggcgtctacgatatccactcgccgaacgtgccgagcgtggaatggatcgaagcgctgctgcgtaaagcggcgcagaacatcccggcggaacgcctgtgggttaacccggactgcggcctgaaaacccgcggttggccggaaacccggcagtcgctggccaacatggtattggcggcgcagcgcctgcgcgagcaggcgtgatggcgtgcggcggatgagctccgccgcttacagattgactggtgtgatgattgggcgcttcggcgcccttttttatgcgggggaggttacttgacgccgtgctgggcgaaccacgccagcatgcgctgccagccgtcttgcgccgcttcggcgttgtagctgggacgataatcggcgttgaacgcatgcccgacctcggggtacaccacgatttcggcctcggcgttggcggcgcgtatcgcctggcgcatggtttccaccgtctccagcggaatgccgctgtcctgcccgccatacagccccagtaccggcgccgacaggtgggtggcgacatcgaccggatgcttcggtgaattcagcgttttctcgccgaccagtttgccgtaccaggcgaccgcggccttcaactgcgggttgtgcgccgcgtacagccaggtaatgcggccgccccagcagaagccggtgatcgccagcttgccggcgtcgccgccgtggcggatagcccagtgcgcggcgtgatccagatccgacagcacctgacgatccggcaccctggtcaccaactgctggaacagctcgccgatatcgctgtagtcgttggcatcgccctggcgaaaatagagctcgggcgcgatcgccagatagccctgcttggccaggcgacggcaaagatcctgaatgtgctcatggacgccgaagatttcctgcaccaccagcacgatgggaaaggggccgttatggtcggcgggtttggcgacgtaggccggcagcgcgtcgccctgagaagggatggtcgtttgcccggcatgaatgccctgttcgtcggtgataatcgcggaggcggccaacggcgcggcggccggggcgaatcccccctgagcctgttctaatgtcatcacatgttcggttttcattgcggtctccgtgcaatagaaaaaagcgctgagattaactataggaaagattacccattattggcgctgcgtggcgcactttcggacaagtcgataaaaaacggctaattatctggctttgcggcatttttaagcgctttttatcatgttattacgcgttttggcccgcgtaagtgccataaggtgcgttagagggcttttttgcccctaagcaaccgataagatggagttatttcggattgatgagctaaatagtttcagccggcaaccaacgggcagggagctgcaaggtttgtcggctagactgaggtttagcggtgcattctggatgccttatagtgatagtgattttttgtgataaaaatcacaaaaaatatgtagcatgtaatttgtttctcttttcatagtgactgtcgtcacgaaattaagcggcgattttcagtagagtgcttttttgttcctcccaataaacatgatccatgaggagtctcgtatgtctcagtctgacgtttttcatctcggcctcaccaagaacgatttacaaggggcccagcttgccatcgtgccgggcgatccgcagcgcgtagagaagattgccaagctgatggaaaatccggtgcatctggcctcccatcgtgaattcaccacctggcgcgcagagctggacggcaaggcggtgatcgtctgctccaccggtattggcggcccgtctacctctatcgcggtggaagagctggcgcagctgggcattcgcaccttcctgcgcatcggcaccaccggcgccattcaggccaatatcaacgtcggtgacgtgctggtgactacggcggcggtacgcctcgacggcgccagcctgcactttgcgccgatggagttcccggcggttgcggacttcgcctgcaccaccgcgctggtggaagcggccaaagccagcggcgcgaccacccacattggcgtaaccgcttcttccgatactttctacccgggccaggaacgttacgacacctactccggccgcgtggtcagccgttttaaaggctcgatggaagagtggcaggcgatgggcgtgatgaactatgaaatggagtccgccacgctgctgaccatgtgcgccagccagggcctgcgtgccggcatggtggctggggtgatcgttaaccgcacccagcaagagatcccgaacgccgagaccatgaaaaacaccgaaagcaaagcggtgcagatcgtggtggatgccgcccgccgtctgctgtaatcgcctcccctgaacgggccgccgccgcggcccgtttttccattcgcgactaatctgttacggtgatactcctcagcgctgcgccgatggccgccgcgcgttgtcataacaaaaacaacgaggacgtttatgaccgcccagatcctgcttcatccttcgcttgcgccgctcgacggcggcattaatttccgtgacttcggcggcaacggcgtggccgacgggcgccgcatcaagcgcggcctgctgtttcgttccggttccctcgagcggctgacggaaaacgactgcgcctttctcgccggcgtgccggtgcgttcggtgctggactaccgcgatgccgacgaagtgcaggccaaaccggatattctgtggaatggcgccgactatcatcacgtgccggccaacccgctgagcagcgaagtcaacgccaacctggagaagctcaccaacgaaacgctggccgctttcgacgcccgcgcgttcatgctggaactgtatcgccgcctgccgttcggcaatgtggcctatcagcggttggcgcagctgctgagcaaccccggcggcggcgcgatcgtgcagcactgcgcagtcggcaaggatcgcaccggggtcggttcggcactggtgctgttcgcgctgggggccgacgaagcgacggtgctggaagactatctgctgactgaaaccacgctggccactttccgcgagcagatgctggatcagctctctatcaagctgaatgcggcggcgctggagcaattcgcctacgtgctcagcgcgcgcgaggagttcctgatgacggcgctgggctgcatccgtcagcaatacggctccaccgaccgctggctggaagcggaatacggtctgggcgcggcccagcgcgaagcgctgcaggcgttctacctcgagtaaatcgctgcgtgtttaaccggggtttaactcgccccggcttatcctaggcggcgaaccatcgcgtatcaggagccccgtattgagcctcaatgacgttatcaactgggtcagcgacgtcgtgcgtcagcacgaaggctgggccattcccatcatcttcttcctggcgttcggcgagtcgctggcgtttttgtcgctgctgctgccggccacggtgatcctgctggcgctgggcgcgctgatcggcgaaagcggcatcgccttttggccgatttgggccgccgccgccgccggggcgtttttcggcgactggctctcttactggatcggctatcactatcaggatcgcgtggcccatatgtggccgctgtcgcgcaatccgcagctgctggcgcgcggccacgccttctttgaacgctggggcgtgctgggcattttcatcggccgcttcttcggcccgctgcgcgccgtggtgccgttggtgggcggcatttgcggcatgccgcagcgctatttccaactggccaacgtcacgtcggcgatgatctgggcgttcggcattctggcgccgggggcgttcggcatcaagtggctcagccagtggctgggttgatttctcgctaaattgcgcagcgccgcgcaatattgtgcgcggccggcaaaatcaggctggacatccatacagcctccccttaacgtgacgggcaatgggcgtgcaaaacgccgcaacggcaaggtgcaacaggaggcagggtggataccagtctgatttatgggattggcggcgtagcgatcggcatgctgttggggtggctgatcgccagtctgcgggtgcagcagacgcatgcgcaacatgaaaccgagctgcggttgctggagcaagcgttgcagcaggcgcagcaggaaacggcggcgcggcaggaaacgctgcagcgccacgaacagcagtcgcgccagagcgagctggagctgcgcaatctgcacagccaactggcggccggacatgagaagctgcaacagctcaaccattggcgcaacgaatgcgaactgctcaatcaggagctgcgcgcccagcgcgaggttaacagcgcgcaggaagccgaactgcgcgaagtcaccatccgtctggaagagacgcgtatggcagcggaggagaagcagcgcctgcttatcaacagcgaacagcggctcaccacccagtttgaaaatctcgccaaccgcatttttgaacacagcggccgcaaggtggacgagcaaaataagcaaagtttggatcgtttactgttgccgctgcgcgaacagctggacggtttccgccggcaggtgcaggacagctttggccaggaggcgcgggagcgccatacgctgacgcacgagatacgcaatctgcagcagttgaacgcgcagatggcgcgcgaggcgatcaacctcaccaaggcgctgaaaggcgacaacaaaacgcagggcaactggggcgaggtggtgctgagccgggtgctggaggcttccggcctgcgcgaaggacatgagtatgaaacgcaggtcaacgtgcgggtggatcatcagagccgcatgcagcccgatgtgatcgtgcgcctgccgcagggtaaggatgtagtgattgacgccaagatgtcgctgatcgcctacgagcgctatttcaacggcgaggatgaggcggagcgcgaagcggcgctgagcgaacatatcgcctcgctgcgcggccacatccgcatgctgggccgcaaggactatcagcagttgccggggctgcgttcgctggattatgtgctgatgttcattccggtcgagcccgccttcctgctggctatcgatcgcgagccggagctgatcagcgaagcgcttaagcacaacatcatgctggtcagcccgaccacgttgctggtggcgctgcgtaccatcaccaacctgtggcgctatgagcatcagagccagaacgcccagcgcatcgccgatcgcgcggcgaaactgtatgacaagatgcggctgttcgtggacgatatgtccgcgctggggcagagcctggacaaggcgcagggcagttatcgtcaggcgatgaacaaactgagcgaaggccgtggtaatcttatcggccaaattgaaggtttccgcgcgttgggggttgaggtcaaacggccgataaacccgctgctggcgcagcaagccggcgcgcaacacgatgaagcggaagaggcgaacgacgatgatgtcgccgcgctgccgcagacgaacgacgatgacgataccgccggggaaccgggcttcgtttcgcacggctgaggccgtggcgaggtggggtattcaccgggcttctggtacactcatccacacaaaattgactgaatagcaggcaggacaatggcagatcaatcgcaggaaaccaccgatttcggttttcgcaccgtcgctagagacgaaaaacaggccatggtggcggacgttttccattcggtagcggcaaagtatgacgtgatgaacgacctgatgtcgttcggtattcaccgtatctggaagcgtttcaccattgactgcagcggcgtgcgccgcgggcagcgcgtgctggatctggccggcggtaccggcgacctggccgccaagttctcccgcatggtgggcgagcaggggcaggtggtgctggcggacatcaacgattcgatgctcaagatggggcgcgagaagctgcgcgatcgcggcatcgtcggcaacatcaattacgtgcaggccaacgccgaagcgctgccgttcccggacaattacttcgattgcatcaccatctcctttggcctgcgtaacgtcactgacaaagacaaagcgctgcgctcgatgttccgcgtgctgaagccgggcggccgtctgctggtgctggaattctccaagccgctgctggcgccgctgagcaaagcctatgacgcctactctttccacgtgctgccgaagatcggcgagctggtggtgaaagatccggacagctaccgctacctggcggaatcgatccgcatgcaccccgatcaggaaaccctgaagggcatgatgggcaacgccggttttgaaaacgtcacctatttcaacctgaccggtggtattgtcgccctgcatcgcggcttcaagttctgagagggagatgccgatgctgtttacccctctgctgaccggtgcgctggaaacctcgctgaataacctgctgtttcgcgatcgcagcatgaaagccgcccgccaacgcctggcgggcaaggtgctgcgcatcgaactggaagagttggcttcgccgctggtgctggtgttcagcgaactgcgcgtggatgtgctggggcagtctgaagacagcgccgattgcaccgtgcgtagccgcattccctccttgctgaagctgcgcgatcgccagcagttgccggtgctgatgcgcagcggcgaattgacggtggaaggcgatattcaggtggtgcaacagctggttggcctgctcgatctggcggagtgggatccggcggagtggctggcgccctacatcggcgatatcgccgcccaaggcattacacaggcgctgggaaaaggcgcctcgctgctgaaagccggctttatgcgccggcagcaagacatggctgaggcgttgacagaagagtggcgcctggcgccggggccgctggaagtggtgtggttcaacgaagaagttgacgcactcgcccgcagcgcggaagcgctgattgcccgcatggacaagttggagggcaagcgatgaccccaggcgaactgcgccgtttgtattttatcgtccgcgtttttctcagctacgggctggacgagctgatccctaaaatgcggttgacgctgccgctgcgctttggccgccggctgctgttctggatgccgaatcggcacaaggacaaaccgctgggtgaacgtctgcggctggcgctgcaggaactggggccggtctggatcaagttcggccaaatgatgtcgacccgtcgcgatctgtttccgccgcacattgccgatcagctgacgctgctgcaggatcgggtggcgcctttcgatggcgcgttggcgcgtaagcatatcgagctggcgatgggcggcccgctggagacctggttcgatgacttcgatcagcagccgctggcctctgcctcgatcgcgcaggtgcataccgcgcggttgaaaaccaccggccaggaagtggtgctgaaggtgatccggccggatatcgggccgatcatcaaggccgacgtgcgtctgatgtaccggttggcaggctgggtgccgaagctgttgccggacggccgccgtctgcgcccgcgcgaagtggtacgcgagtatgagaaaactctactggacgaattgaacctgctgcgcgaagcggctaacgccattcagctgcgccgcaatttcgacggcagcccaatgctgtacgtaccggaagtttattccgactactgccgcgaaagcgtattggtgatggagcgcatttacggcattccggtctcggacatcgccacgctggaacagcagggcaccaacatgaaactgttggcggaacgcggcgtccaggtgttctttacccaggtcttccgcgacagcttcttccatgcggacatgcatcccggtaatattttcgtcagctacgaacatccggaagatccttgctacatcggcatcgactgcggcatcgtcggttcgctgaacaaggatgataaacgctacctggcggaaaacttcatcgccttcttcaaccgcgattaccgcaaggtggcggaactgcacgtcgactccgggtgggtgccgcgcgacaccaacgtggaagacttcgaattcgccatccgcaccgtgtgcgagccgattttcgagaagccgctggcggagatttccttcggcaacgtgctgctgaacctgttcaacaccgcgcgacgcttcaatatggaagtgcagccgcagctggtgttattgcagaagaccttgctgtatgttgaaggactggggcgtcagctctatccgcaactggatctgtggaccaccgccaagccgttcctcgagagctggctgcgcgatcaggtcggcattcccgccgtggtgcgtgcgctgaaagagaaagcgccgttctgggcggagaagctgccggaactgcccgagctgttttacgacagcttgcagcagcataaactgttgcaacaaagcgttgataagctgaccaaccagatgcaggctcagcgggttcgtcaggggcagtcacgttatttgttcggcgttggcgctacactgttggtaagcggcacgctgttgctgctggggcaaatcgaggtgtttcccgcctggatgatggccgccggcatcgtatgctgggtgattggctggaagcgaaccacctgatttaattcgttactctggtaaagtcggctctataatgcgggctggctttaaaagaccctttaaaattagaggtaattaaaatgggcggtattagtattacgcaattgttgatcatcgcagtgatcgtggtgctgttgttcggtaccaaaaaactgcgcacgctgggctccgatctcggcgcctcgatcaagggcttcaagaaggcgatcggcgacgatacgccatcgacccccaacacggctgagaaaagcagcctggatgacgctgacttctcggccaagcctattaccgataagcagccggaagtgaaaccggaagagtcgaagaacaaagagcaggtataaaccgtgtttgacattgggtttagtgagctgctgctggtgctggtaatcggcctggttgttctggggccggaacgcttgccggtcgcggtcagaacggtatcgggctggatccgcgcgctgcgctcgctggcggcctcggtgcagcacgaactgtctcaggagctgaagctgcaggagctgcaggacagcctgaaaaaagcggaacaggccggcctgcagaacctgacgccggaactgaaggcgtcgatggatgagctgaaagacgcggcggaatcattgaaacgcacctaccagggcgagaaagaagagctggcgaacaccattcataacccgcagatcaccgatccggaagccttgcacgacggcgtgacgccggcggaagcggcaacccgcgccagtgcgcccgccgccgcgccaaaaccggcagcggaacctgaagccgtcgcgcccgtgtcaccagcaccgccggtggcggcgcaaccggctaaggcgccggcggaaaccgcgccggcacctgtcgaacctgttgcggataaaaccccagcgtctcaccaacctagtggcgatcgttaatacatggctgttgaagatacccaaccccttatcagtcatctgatagagctgcgcaagcggctgttgaactcgattatttgcgtgctggcggtgttcgtggtgctggtgtttttcgccaacgacatctaccagttggtctctgcgccgctgctcaagcagctgccggccggggcgagcatgatcgctaccgacgtggcgtcaccgttctttacgccgatcaaattgaccatgatcgtctcggtgttcgtctccgcaccgatgattttgtatcaggtgtgggcattcatcgcgccggcgctgtacaagcatgaacgccgcctgatgatgccgctgctggtgtccagcagcctgctgttctacctcggcatggctttcgcctacttcatcgtgttcccgctggccttcggcttctttgccaagaccgcgccgatgggggtgaccattgccaccgacatcaaaaactacctcgatttcgtcatggcgctgtttatggcgttcggcgtcgctttcgaagtgccggtcgccatcattctgctgtgctggagtggcgtcacctcgccggaagatctgaagaagaaacggccgtatgtgttggttggcgcgtttgtggtcggcatgctgttgacgccgccggacgtgttctcgcaaaccctgttggcaataccgatgtatctgctgtttgaagtgggggtgttcttcgcccgcttctataccggcaaacgtcgtccgcaggcggaagaagaagacgagggtgacgaaccgccagctccctgatccatcttgattgcgaagccgcccattgggcggcttttgctttggaaaaaatcatgtttgatatcggcgttaatctcaccagcagccaattcgccaaagaccgccaggcggtggtggagcgcgcccgcaccgcaggggtgaccgggatgttgattaccggcaccgatctgccggagagccgcgaagccgccgaactggcgcaacaacatccgggctacggttggtctaccgccggtgtgcatccgcattacgccagcggttgggatgaacacactgccgagcagatttatgcgttagccgcacgccctgaagtggcggcgatcggcgaatgcggcctggattttaatcgcaacttctcgacgcccgtacagcaggaagcggcgttcaccgcgcagctggcgctggcggcggagttggcgctgccggtgtttcttcattgccgcgacgcacacgcacgttttgccgagctactgacgccgtggttggataaactgcccgcggccgtggtgcactgcttcaccggcaccgccgaagaattaacaagctgcctgtcgttgggcctgtcgatcgggattaccggttgggtctgcgacgagcggcgcggcctggaattgcgtgccctgttgccgcagatcccggccgagcgtctgctgctggaaacggacgccccttatctgttgccccgggatttacagcctaaacccgcatctcgccgcaacgaaccctgtttcctgccccatatcgtgcatcaggtcgccgtctggcggcaggaagagccgcaatggctggggcaaaaaaccgatgagaacgcccgccggctattccggctggtttgagctaggagaaaactatgagctatgtatttccgggcaccttccctggtcgccgtatgcgccgcgtgcgccgtcacgacttcagccgccgcctggtggccgagaatcaactgacggtcaacgacctgatttatccggtgtttgtcatggaaggcagcaaccgccaggaagaagtggcctcgatgccgggcgtatcgcgcatgacgatcgatctgctggtgaaggaagcggaaaccatcgccaaacttggcgtgccggtgatttccctgttcccggtgatcgaaccgagcctgaaatcgctgcatgcggaagaagcctataacccggaagggttggtacagcgcacggtgcgcgcgctgaaagacgcggtgcctgaactgggcattctgaccgacgtggcgctcgatccctacaccacgcatgggcaggacggggtgatcgatgagcagggttatgtgattaacgacgtgaccaaagacattctggtgcgtcaggcgctgtcccatgccgaagcgggggcggaaatcgtggcgccgagcgacatgatggacggccgcatcggggcgatccgcgatcgtctggaattgcagggcctggtgaatacccaaatcatggcctactccgccaagtatgcttcctgctactacggcccgttccgcgatgcgttgggctccagcggcaacctgaagggcggcaacaagaagacctatcagatggatccggccaacagcgacgaagcgctgcaggagattgcgcaggatctgcaggaaggtgcggacatggtgatggtgaaaccgggcatgccgtacctcgacgtcgtgcgccgtgtgaaggataccttcggtgtgccaaccttcgcttatcaggtgtccggcgagtacgccatgcatatggcggcgattcagaacggctggctgcaggagcaacctgcggtgatggaatcgttgatgtgcttcaaacgcgccggcgccgacggcgtgctgacctacttcgccaagcgtgtcgcgcagtggctgcacgacgatgcgatgcgtcgctaagcgcaaaatgagccaacaaaaaggcgcctgagggcgccttttgcattacatcttctggaactgtcggttgtcgatgctttgactgacctgcttgttgatcaggttcagcaacaacatggaacgcgcctcgccgtccggttcggtgtagatcgcctgcagcccttcgaacacgccgtcgacgatcagaacggtatcccctggctgtggggtttccggatcgacataggtttcgctggcgtgcgtgcgcagctcatcgatcaccttgctcgggatgacgctcggcaacgtgccgaaacgcacgaagtggctgacgccacgggtggcgctgatggtggtggtgtgaatgcgctccggatcgaactccacaaacagatagttgggaaacaggggttcgctgaccgcgatacgcttaccacgcacgatcttttccagcgtgatgatcgggctgaggcagtttacctgctgccgctccagatgttcctgcgcccgcaacagctgaccgcgtttgcaataaagtagataccaggattccataatttcacatgcctttctgccagccggtaagcatatcaaaagctattccggatacatagtgatgcaagtttcagtgtgtaacatcacctatctctatgaatctgcggctattagcgaggggtcacacacttatcgatacggtgctggtataacagagggctaaaaatttgttaccgtcacagtatggcaggcgctgcgccgccggctgtgacgttattcatcgttttgaccgagagggaaagaaatggagctgtttctgttgagcaacggcaagctgtctggcgaagccgagctgctggggtacgccaaaagccaactgctggcgatgattgcgcgtcgcggcatcaaatccgccgtctttatcccttacgccctgatccgttacgactacgaccagcgtgcgcaggaactggcgcaaacgctgggcatcgaagtcaccagcatccaccacgccgcttcgccggcggcggcgatcgcgcaggcggagtgcattttggtcagcggcggcaatacctggttgctgaaccaaatgctgcacgaacaaggcctgatcgtgcccatccagcgcgcggtgcgcgagcgtgaagtgccttacgtcggctggagcgccggttgcaacgtggccacgccgagcattcgcaccaccaatgacatgccggtgcgctgcagcgtggtgctgccggcgctggggctgttcccggcgcagatcaacccgcactacatcgacgcacatatcagcggccacatgggcgaaacccgtgacgagcgcctggcggagttctgcgcggtcaatccaagcgagtcggtggtagcgctgcgtgaaggtagcctgctgcacgttgaaggcaatgcgctgcgttacttcagcgctaacgggcagggcttcaaggtgttccgccacggtgaggagacgcgtgaatatcaggatacgcgcgcgctggctgcgctggtgccgttcaactgcggctgagggccacccggcggcgggcggcgttaacaaaattgcagcaacaaccgtgaagagggcttataatgccctccccactggccgttataatgatcagcatgaaataccgtgacttacgcgatttcctctcgttgctggagaagagaggggaactaaaacgcatcagccagccgatcgatccttacctggaaatgacggagattgccgatcgcaccctgcgagcgggcggtccggcactgctgtttgaaaacccgaaagggtatgacatgccggtgctctgtaacctgttcggcaccgccaatcgcgtggcgatgggcatggggcaggaagacatcagcgcgctgcgcgaagtcggcaaactgctggcgttcctcaaagaaccggagccgccgaaaggcttccgcgatctgttcgacaaaatgccaaagttcaagcaggtgctgaacatgccgaccaaggtgctgggatccgcgccttgtcaggagcaggtatggcagggtgacgatgtcgatctcagccgtattccggtgatgcactgctggccggaagacgctgcgccgctgatcacctgggggctgacggtgacccgcggcccgcataaggaacggcaaaacctcggcatctatcgccagcaggtgctgggcaagaataaagtgatcatgcgctggctgtcgcatcgcggtggcgcgctggattatcaggagtggtgccaggcgcatccgggcgagcgtttcccggtcgcggtggcgctgggcgccgatcccgctaccatcctcggtgcggtcacgccggtgccggataccctgtctgaatatgcctttgccgggctgctgcgcggcaataaaaccgaagtggtcaagtgcctttccaacgatctggaagtgcccgccagcgccgaaatcgtgcttgaaggctatatcgagccgggtgaaatggcgccggaaggcccctacggcgaccacaccggttactacaatgaaatcgaccagttcccggtgttcaccgttacccacatcacccagcgccgcaacgcgatctaccactcgacctacaccggccggccgccggatgagccggcgatcctgggcgtggcgctgaatgaagtgttcgtgccgatcctgcaaaagcagttcccggaaatcgtcgatttctatctgccgccggaagggtgctcgtaccgcctggcggtagtgaccatgaaaaaacagtacgccggccacgcgaaacgcgtgatgatgggcgtctggtcgttcctgcggcagtttatgtacaccaaatttgttatcgtctgtgacgatgacgtcaatgcgcgcgactggaacgacgtgatttgggcgatcaccacacgaatggatccggcaagggatactgttctggtggagaatacgccgatcgactatctggacttcgcctcgccggtttccggcctgggttcgaagatggggctggacgccaccaataaatggccgggtgaaaccgatcgcgaatggggccgtccgattcagatggatgaaaaggtacgtgcgcgcgtcgacgaaatctgggatgagctcgcaatcttcagtgacagggaaccgacgttatagcgtcaggccctgttctcagctttgcattgatgacccgacagagggaacgcatgacaatattgagctgtaaagtgacctcggtagaggccattaccgatacggtttatcgggtacgtctggtgcccgaacagccgttttctttcaaggcagggcaatatctgatggtggtgatggatgagcgcgacaagcgcccgttctcactggcatcaaccccgacgcagcaagattacatcgagctgcatatcggcgcttcggagctgaatctgtacgccatggcggtgatggatcgcatcctgaaagagcaggcgatcaccgttgacgtgccgcatggcgacgcctggctgcgggaagagggcagccgtccgttggtgctgatcgccggcggcaccggtttctcttacgcgcgttcaatcctgttgaccgcgctggagcagcagccggatcgcgacatttcaatctactggggcgggcgtgagctgaagcacctgtacgatttgagcgagctggaagcgctgtcgttgcagcatccgaatctgaaggtgatcccggtggtcgagcagccggaggctgaatggcgtggccgcagcggcaccgtgcttagcgcggtgctgcaggatttcggcacgctggcggagcatgacatttacatcgccgggcgtttcgagatggcgaaaatcgcccgcgagcgtttctgcgccgagcgcggcgcgctggaagcgcatatgtttggcgacgcgttttcgtttatctgacacaggcgatgcgcagtgaacggggtggccgagggtcgccccgtttttatttgggcgtcggcaaatttcaggcataaaaaacccgcccctgacaggcgggaagaacggcaactaaacttggcgggatgccgcgatttgaagtggtgacgcggtcatcccaagatagacacagctaaacgcgttcaaacacggtggcgataccctggcccaggccgatgcacatggtcgccaggccgaactgcgcgtcgcgacgttccatgttgttcaacagggtggtcgagatgcgggagccggaacaccccagcgggtggccgagcgcgatggcgccgccgttcaggttaatcttgtcgtcgatgctgtccatcagccccagatccttgatgcacggcagcgactgggcggcgaacgcttcgttcaactcgaacagatcgatgtcctgcacgctcagaccggcgcgtttcagcgccagcttgctggccggcaccgggccgtagcccatgatggacggatcgcagccgacgaccgccatcgagcggatgcgggcgcgggccttcaaaccgagcgctttggcgcgcgattcgctcatcagcagcatggcggaagcgccgtccgacagggcggaggagctgccggcggtgacggtgccgttgaccggatcgaacgccgggcgcagggccgacaggctttcgacggtggtctccgggcgaatgacttcatcgaaatcgtaacgggtcagcacgccgtcggcgtcgtggccgttggtcggtatgatctcgtttttaaagtaaccggccagcgttgctgcatgcgcgcgctggtgggagcgggcggcaaattcatcctgcatctggcgactgatgttgtgcatcttggccagcatttcggcggtcagccccatcatcccggcggccttggccacgctgcggctcaggcccggatggaaatccacgccgtgattcatcggcacatggcccatgtgttccacgccgccgatcaggctgatgtgcgcgtcgcccaccatgatggcgcgtgccgcgtcgtgcagcgcctgcatcgaagagccgcacaggcggttgacggtcaccgccggcacgcggtgcgggatctcggccagcagcgcggcgttgcgggcgatgttgaagccttgttccagcgtctgctgcacgcagccccagtaaatgtcatcaatctcggcggcgtccagcgccggattgcggctcagcacttcacgcatcaggtgagcggagagatcttcggcgcgtacctggcggaatgcgccgcccttggagcggcccatcggcgtgcgtacggcatcaacaataactacgttttccatctttatgacctcatgccggttggcgggtagcgacgtcggacagcggtgtcgccaccgggtagtagctttcattgcgttcggccttggcgcgcagaccggccggcacctggtacagggcgccgaggtgtgcgtaacgctgggccagctcaacgtagttggcggtgccgagcgtatccaggtagcggaacgcgccgccgtggaacggagggaaaccgatgccgtagaccaacgccatatcggcttcggccgggctggcgacgatattttcttccaggcaacgcaccacttcgttgatcatcgggatcatcatgcgcgcgatgatttcttcgtcgctgatggtctggcgcggttggctcacttcggccagcagcgcatcggtctgctcatcgttgtccttgcgcggtttgcctttgctgtcctggctgtagcggtagaagcccagttgatttttctgaccgaagcgctggttgtcgaacatcacgtcaatggcgtcgcggtagtctttgctcatgcgatccgggaaaccggcggccatcacggcctgcgcgtggtgcgcggtgtcgatgcccacgacgtcgagcaggtaggccgggcccatcggccagccgaactgtttttccatcactttatcgatttgacggaagtcggcgccgtcgcgcagcagcaggctgaagccggcgaagtacgggaacagcacgcggttgacgaagaagcccgggcaatcgttcaccacgatcggcgttttgcccatgcggctggcgtaggccaccactttggcgatggtatcatcgctggtctgttcgccgcggatgatttcaaccagcggcatgcggtgcaccgggttaaagaagtgcatgccgcagaagttttgcgggcgcttcagcgattttgccaggtgattaatcggaatggtcgaggtgttcgacgccagaacggtgtcttcaccgatcaggccttccacttccgacagcacggcggctttgactttcggattctcgacgaccgcctcaacgatcacctgcgcgcgctcgatgccggcatagtccagcgtcggctgaatggtcgacagcacctgcgccattttcaggccatccagcttgccgcgctccagctgcttgttgagcagcttggccgcttctctcatgcccagcgtcagcgacttgtcgctgatgtccttcatgatcaccggtacgcctttcagcgccgattggtaagcgataccgccgcccatgatgccggcgcccagcaccgccgcctgttttggcgcatccacattcttggccagctttttcgcctggcccttcacgaactgatcgttaaggaagatgccgaccagcgcgcgcgcttcgttggagcgggccaacggcacgaagctggcggtttccagtttcagcgcttcatcgcggcccagcttggcggcggcttcaatggtcttcaccgcggtcatcggcgccgggtaatgtttaccggcggtctgcagtaccatgcctttggcggtggtgaagctcatcgccgcttcaatcgggctgagtttcagcggctccagcttaggttgacgcgcggcgcgccagtccagcttgccgtcgatcgcctgttgcagcatgttgagcgccgcttcggccagtttttccggcgccactaccgcatcgaccaggccgactttcaacgcgtctttggcgctgacgtctttgccggcggcgatgatttccagcgcgctgtcgttacctagcaggcgtggcagacggacggaaccgccgaagcccggcatgatgcccaatttggtttccggcaggccgatgcgcgcgtccggcgaggcgacgcggaaatcggtcgccagaatgcattcgcaaccgccgccgagcgcatagccgttaatggccgaaatggtcggtaccggcaaatcttccagccggttaaagacgttgttggcgaataccagccactcgtgcagcttttcagccggtgcggcaaacagagaaaggaattcggtgatatcggcgccgacgataaatgcggctttggtggagcgcagcagcagccccttgagctcaggctggttttccagcacggtgagcgcctcgcccaggctggcgacggtgcgggtgtccagcttgttgaccgagcctgatgcgttgaacaccagctcggcaatgccgttatcgagccagtgcagttgtaatgtttcgccttggtagagcatgtctatctcctgaatcagcgtatgatctggtatgaccagatgaagaggagtgtggtttttatgttaaaaatatgcaaatgagagattgcatatttgctggtctgatcacatctcaccaagttagtgttttgatttaaaacggagttatattttatgtgctatcggcatttgctggagtttgtcggccctcatacacttgctcgcagcgattgatcattcagacgaggtaaggcatgactaaggcggtttgtgtcaaacgcagcggcttatggagcattcccgccagaaccatgacgctggcgtgtctgttggtgtttatggcgcagatggcgacgaccgtgtatctgccttcgctgccgacggtgatgcgcgagctggcgatgagccggcgcgccaccgagctgtccatttcgatcttcgtcatcggcgctgccttgccggtgctgttctggggcgcggccgccgatcgctttggccgccgagcgccgctgacgctttccctgctgcttttcattggctgcagcgggctgttggcgctgtgcagcaacggtacccaattactggcgctgcgtgcgctgcaaggtgtgggtgccggtggtgcggcgatcattgcgcgtatcatcgtgcgggataactggagcggtgatgagctggcgcgccgtctgtcggtgctctccatcgcttttatcaccgcgctgggcggcggtcagtttgtcggcggcctgctcagccaatattcgcactggcagatgggcttcgtcctgatgggcgccaccggtttggccattctggcgctgatggcgacgctgccgctggaggcgggacgggcagggggcgtgcgcccggcgatggcggcaacctactttgccatcctgcggcggccggggttcttctggccggcctgcgtcggcggattgggcttcgccaccacggtgacattgcaggaggtgagtccgttcgtcatgcagcagggttttggtctcaacgttacggcgttcggtgcgctggggctggtgatcggcgtcgcctacttcagcggggcgctgacggtgaaccgcacggtggcgcgtgtcggcgggaaaaaactgatgcaggccggcagcggcatcgtggcgctggcgacggcggcgatcctgctgttgtggtggagcggcgtcctggccggcctttccggcatggcgctgttcatcgcgctgtattgcctgaccatttttggccaggcggtgctgtttcccaacagcatggcgatggccgtcagcgatgccaaagagtacggcgcttatgcgatggcgctgtgtggctttctgcagcagtgtctggcgggcgtcgccgcggctggcgcggtgttgttggaacaccatggcctgtgggcgctggcgatagcgctgctcggtttgggcggctggttaatggttaagctgcggatgtaacggcatttgcagggaattgcgagctgctccgcatgcccaacgcgatgaggttggtgcgccggagcgctgtgttaagatgacttctttcgtgctaaggcataagggtactgtgatggaaacgctggcttctttgtataacgaccacctggcagagctgcaaaaacgcgcgcgcgaagtgctggagcgcaacaagttggatgcgctgctgattcactccggtgagctgcaaaaggtatttttggacgaccatagctatccgttcaaagtgaacgcgcatttcaaagcctgggtgccggtgacgtcggtgccgaactgctggttgtggatcgatggtgtcaataagccgaagctgtggttctactccccggttgactactggcacagcgtagagccgctgccgaacagtttctggaccaagtccctcgaattgatgccgctggccaacgccgatgcgatcgcgcagcagctgccgtcgcagcgtgagcgcgtcggctatatcggttatgcccaacagcgcgcccgcgatctcggcatcccttcggaaaacatcaacccgaaagcggtgctgaactacctggatttccaccgttcgattaaaaccggctatgagctggcctgcatgcgcgaagcgcagaagacggcggtaaccggccatcgtgccgcgcatgaggcgttcctctccggcatgagcgagttcgacatcaatctggcctacctgacggctaccggccaccgcgataccgacgtgccttacgacaacatcgtagcgctgaacgaacacgcttcggtactgcactacaccaagctggatcatcagccgccggccgaacccctgagtttccttatcgacgccggcgcggaatataacggctatgccgccgatctgacccgcacctacgcggcgcaaagcggcagcgagttcgcccacctggtgaaagatctcaatggtgaacagctggcgctgatcgacaccatcaagcccggcgtgcgctataccgactaccatgtgcaaatgcatcagcgcatcgccaagctgctcaagaatcacaagttggtgaacggcctcagcgaagaggcgatggttgaaacgggtattaccacgccgttcctgccgcacgggctgggccatccgctgggccttcaggtgcacgacgccgccggctttatgcaggacgagcaaggcacccatctgccggcgccgtccaagtatccattcctgcgttgcacccgcgtgttgcagccgggcatggtgttgaccatcgagccaggtctgtacttcatcgagtctctgttggcaccgtggcgcagcggtgaattcaagcagcacttcgcctgggatcgcatcgatgcgctgaagccgtatggcggcatccgtatcgaagacaacatcgtgatccacgaaaagcgcatcgagaacatgacgcgcgatctgaacctggcctgatgcggccttacccgataccggcggaagccacctgctttaccgaagaaataaagaagagccgttttatcaccctgctggcgccgaccagcggggtagaagcggcaaaggcgtttattcagcaggtgcgggatgagcatccggcggcgcgacaccattgttgggcttgcgtcgccggcagccccgatgattcgcagcaactggggttctcagacgacggagagccgtcgggcaccgccggcaaaccgatcctcgcgcagctgatggggagcggcatcggtgaagtgaccgccgtggtcgtgcgttactatggcggcgtcaagctgggcaccggcgggctggtgaaagcctatggcaacggtgttcaacaggcgttgaagcagttggcgttggcacaaaaggtgccggaagccgaatatatcttgcagtgcgactatgcgcagttggcgttggtggagaacttgctgcagcaaaccgcaggtcggatcctacagggcgaatacggcgccgccgtcgtgctgcatctggcgttgccggccaccgaggtcgaactgtttgggaataaattgcgtgatctcagtcgcggtaatttgcaattaacccccatttcgcaataattcctcccaattgaattgctaaggatcgtgctgaaatgcattttcgcgccataacccgtatcgttggtctgctggtcatcctgttctccgggacgatgtttattcccggcctggtggcattgatttaccgcgatggggcggggcgcgcgttcagccaaaccttcttcgtggcgctgaccatcgggctgatgctgtggtggccgaaccgcaaacagaaacacgagctgaagccccgtgaaggcttcctgattgtcgtgttgttctggaccgtgctgggcagcgtgggggcattgccgttcctgttttcggaacggcccaacttgtcgctgaccgacgccttctttgaatccttctcgggattgacgactaccggcgcaacgacgctggtggggttggactcgttgccgaaggccatcctgttctatcgccaaatgctgcaatggatgggcgggatggggatcatcgtgttggcggtggcgatactgccgatacttggcgtcggcggcatgcagctgtatcgagcggaaatgcccgggccgctgaaagataacaagatgcgtccacgcatcgccgaaaccgccaaaaccctgtggctgatctatgtgttgctgaccgtcgcctgtgcgctggcgctctggggggccgggatgtcggtgttcgacgccatcggccacagtttctcgaccatcgccattggcgggttttctacccacgacgccagtatcggttattacgccagtccgactatcaacaccatcatcgccgtgttcctgctgatttccggctgtaactacggcctgcacttcgctttgctaagcggccgtagtctgaaggtgtacgggcgcgatcctgaattccgcatgttcatcttcgttcagttgacgctggtggtggtatgcacgttggtgctctggggacatggcgtctataagagcggtatggaaacgctcaatcaggcgttcttccaggtggtatcgatggcgaccacggccggttttacgaccgacagcatcgccaagtggccgctgttcctgccgatgttgttgctgtgctcggcgttcatcggcggctgcgccggctcgaccggcggtggcctgaaggtgatccgtattctgcttctgtacctgcagggctcgcgcgagttgaagaggctggtgcaccccaacgcggtctataccatcaaactgggcaaccgcgcgctgccggaacgcattctggaagcggtatggggattcttctccgcctatgcgctggtgtttatcgtcagtatgctggcgatcattgccaccggcgttgacgatttttccgcgttcgccgcagtgacggcaacactcaataaccttggccccggcttgggcgtggtggcggataacttcaccacgatgccggcggcggccaagtggatcctggtggtgacgatgctgttcgggcgcctggaagtgtttacattgctggtgctgttcacgccaactttttggcgtgagtgagcctgatataaggagtacgccatgaaggcattgatactttattcgagccgtgacgggcaaacacgtgctatcgcttcttatatagcaagcaagttgcaggacacgctgcgttgtgaggtgattgatctgctgcaggcggaacaggtcgaccttagtcagtaccagcaggtgatgatcggtgcttctatccgttacgggcactttaatccggtactggataaattcgttaagcgccatgccgaacagctgaataggatgccgagcgccttcttcgccgtgaacctgaccgcgcgtaaaccggaaaagcgctcaccgcaaaccaacgcttatacccgcaagttcctgctggcctcgccgtggcagccaaaacagtgcgcggtgtttgccggcgcattgcggtatccgcgctatcgctggttcgaccgcatcatgattcaatttattatgcgtatgacgggcggtgaaacggataccagtaaggaagtggagtacaccgattggcagcaggtcgatcgtttcgcccaggaatttagccagatccagtacgaaaagtgacaaaaacgcgggtttggccagcgttttgccgaaaaaatcctcgcttgaaaagttttttgcaattaggggttgcggcctgccgagaactccctataatgcgcctccactgaccgggaacaacgactgacaagccgccgggtcagcgagaagaaagcgaaataaacgcttgactctccgggcgaaaagcgtagtatacgcagcccgcgccgatgaagtttctcggcactgctctttaacaatttatcagacaatctgtgtgggcactccacaagacgatatccagcatcttcggatgcaaaaaaatatcaagtcttgaagagtgactaactgaagtaaaattcatgcagtaaatctttgagcatcgcttctcgagtggaagcaaatcaagcttttaattgaagagtttgatcatggctcagattgaacgctggcggcaggcttaacacatgcaagtcgagcggtagcacaggggagcttgctccctgggtgacgagcggcggacgggtgagtaatgtctgggaaactgcctgatggagggggataactactggaaacggtagctaataccgcataacgtcgcaagaccaaagagggggaccttcgggcctcttgccatcagatgtgcccagatgggattagctagtaggtggggtaatggctcacctaggcgacgatccctagctggtctgagaggatgaccagccacactggaactgagacacggtccagactcctacgggaggcagcagtggggaatattgcacaatgggcgcaagcctgatgcagccatgccgcgtgtgtgaagaaggccttcgggttgtaaagcactttcagcgaggaggaaggtggtgaacttaatacgttcatcaattgacgttactcgcagaagaagcaccggctaactccgtgccagcagccgcggtaatacggagggtgcaagcgttaatcggaattactgggcgtaaagcgcacgcaggcggtttgttaagtcagatgtgaaatccccgggctcaacctgggaactgcatttgaaactggcaagctagagtctcgtagaggggggtagaattccaggtgtagcggtgaaatgcgtagagatctggaggaataccggtggcgaaggcggccccctggacgaagactgacgctcaggtgcgaaagcgtggggagcaaacaggattagataccctggtagtccacgctgtaaacgatgtcgatttggaggttgtgcccttgaggcgtggcttccggagctaacgcgttaaatcgaccgcctggggagtacggccgcaaggttaaaactcaaatgaattgacgggggcccgcacaagcggtggagcatgtggtttaattcgatgcaacgcgaagaaccttacctactcttgacatccagagaactttccagagatggattggtgccttcgggaactctgagacaggtgctgcatggctgtcgtcagctcgtgttgtgaaatgttgggttaagtcccgcaacgagcgcaacccttatcctttgttgccagcggttcggccgggaactcaaaggagactgccagtgataaactggaggaaggtggggatgacgtcaagtcatcatggcccttacgagtagggctacacacgtgctacaatggcgtatacaaagagaagcgacctcgcgagagcaagcggacctcataaagtacgtcgtagtccggattggagtctgcaactcgactccatgaagtcggaatcgctagtaatcgtagatcagaatgctacggtgaatacgttcccgggccttgtacacaccgcccgtcacaccatgggagtgggttgcaaaagaagtaggtagcttaaccttcgggagggcgcttaccactttgtgattcatgactggggtgaagtcgtaacaaggtaaccgtaggggaacctgcggttggatcacctccttacctaaagatattgcttcgcgtggcgtgctcacacagattgtctgatgaaaaagtaacgagcaaaagcgtcataaaagtacggtgtcgtgtccccttcgtctagaggcctaggacaccgccctttcacggcggtaacaggggttcgaatcccctaggggacgccaagcttccgacccacccggtgaaagcggcggtcttcagtatctgacgatacaccatatcttaaagatgacttccgagtcatgtttaagatattgctctttaacaatctggaacaagctgaaaattgaaacatgacggctgaaatttgtccctccgtagatgtattgggatgaagagtaacctgtcatagagtctctcaaatgtttgcagcgcgaacgatggaaacatcttcgggttgtgaggttaagtgactaagcgtacacggtggatgcctaggcagtcagaggcgatgaagggcgtgctaatctgcgaaaagcgtcggtaaggtgatatgaaccgttataaccggcgatacccgaatggggaaacccagtgtgtttcgacacactatcatgtcatgaatacatagtggcatgaggcgaaccgggggaactgaaacatctaagtaccccgaggaaaagaaatcaaccgagattcccccagtagcggcgagcgaacggggaggagcccagaacctgaatcggcttgtgtgttagtggaagcgtctggaaagtcgcgcagtaaagggtgatagccccgtacactaaaatgcacaggtcgtgagttcgatgagtagggcgggacacgtgacatcctgtctgaatatggggggaccatcctccaaggctaaatactcctgactgaccgatagtgaaccagtaccgtgagggaaaggcgaaaagaaccccggcgaggggagtgaaatagaacctgaaaccgtgtacgtacaagcagtgggagcaccttcgtggtgtgactgcgtaccttttgtataatgggtcagcgacttatattttgtagcaaggttaaccgtataggggagccgtagggaaaccgagtcttaactgggcgattagttgcaaggtatagacccgaaacccggtgatctagccatgggcaggttgaaggttgggtaacactaactggaggaccgaaccgactaatgttgaaaaattagcggatgacttgtggctgggggtgaaaggccaatcaaaccgggagatagctggttctccccgaaagctatttaggtagcgcctcgtgaactcatcttcgggggtagagcactgtttcggctagggggccatcccggcttaccaaaccgatgcaaactccgaataccgaagaatgttatcacgggagacacacggcgggtgctaacgtccgtcgtgaagagggaaacaacccagaccgccagctaaggtcccaaagtcatggttaagtgggaaacgatgtgggaaggcatagacagccaggatgttggcttagaagcagccatcatttaaagaaagcgtaatagctcactggtcgagtcggcctgcgcggaagatgtaacggggctaaaccatgcaccgaagctgcggcagcgacgcttaggcgttgttgggtaggggagcgttctgtaagccgttgaaggtggcctgtgagggttgctggaggtatcagaagtgcgaatgctgacataagtaacgataaagcgggtgaaaagcccgctcgccggaagaccaagggttcctgtccaacgttaatcggggcagggtgagtcgacccctaaggcgaggctgaaaagcgtagtcgatgggaaacaggttaatattcctgtacttggtgttactgcgaaggggggacggagaaggctaggctggccgggcgacggttgtcccggtttaagcgtgtagggggtgtgacctggtaaatccggttgcatattaaccctgaggcgtgatgacgatgcactacggtgcagaagtagttgatgccctgcttccaggaaaatcctctaagctccaggtaacattaaatcgtaccccaaaccgacacaggtggtcaggtagagaataccaaggcgcttgagagaactcgggtgaaggaactaggcaaaatggtgccgtaacttcgggagaaggcacgctggcatgtaggtgaagtccctcgcggatggagctgaagccagtcgaagataccagctggctgcaactgtttaataaaaacacagcactgtgcaaacacgaaagtggacgtatacggtgtgacgcctgcccggtgctggaaggttaattgatggggtcagccgcaaggcgaagctcttgatcgaagccccagtaaacggcggccgtaactataacggtcctaaggtagcgaaattccttgtcgggtaagttccgacctgcacgaatggcgtaatgatggccaggctgtctccacccgagactcagtgaaattgaactcgctgtgaagatgcagtgtacccgcggcaagacggaaagaccccgtgaacctttactatagcttgacactgaacattgagccttgatgtgtaggataggtgggaggctttgaagcgtggacgccagtctgcgtggagccatccttgaaataccaccctttaatgtttgatgttctaactcggccccgtgatccggggtgaggacagtgtctggtgggtagtttgactggggcggtctcctcccaaagagtaacggaggagcacgaaggttagctaatcacggtcggacatcgtgaggttagtgcaaaggcataagctagcttgactgcgagagtgacggctcgagcaggtacgaaagtaggtcttagtgatccggtggttctgaatggaagggccatcgctcaacggataaaaggtactccggggataacaggctgataccgcccaagagttcatatcgacggcggtgtttggcacctcgatgtcggctcatcacatcctggggctgaagtaggtcccaagggtatggctgttcgccatttaaagtggtacgcgagctgggtttagaacgtcgtgagacagttcggtccctatctgccgtgggcgttggaagattgagaggggttgctcctagtacgagaggaccggagtgaacgcaccactggtgttcgggttgtcatgccaatggcattgcccggtagctaagtgcggaaaagataagcgctgaaagcatctaagcgcgaaacttgcctcaagatgagtcttccctgggcctttaaggcccctgaaggaacgtttaagactaagacgttgataggctgggtgtgtaagtgcagcgatgcattgagctaaccagtactaatgatccgtgaggcttaaccttacaacaccgaaggtgtttttagagagacaaaatcgtcgggaacgattttgaacaacgcggagcgttggccccgaaggggtgagtatcaggatgatacgaataattttcagcgaagttccgagattggttctgatggcgacacgagagtgaagcggttggaatgaaacgaatttgcctggcggcaatagcgcggtggtcccacctgaccccatgccgaactcagaagtgaaacgccgtagcgccgatggtagtgtggggtctccccatgcgagagtaggacactgccaggcatcaaacaaagccgaaagccctgaactgacgttcagggctttttgctgtgcgtaaaataaatatcctgacagtatctattactttgaaaaatgcctttttgggcatatgtagcttatccttataaggaagcataatgtttctttgctagggaaatagccagctaaatatataattgatagttccagattattatttaaataataaaaatatctatctatgaacagactgatgagaattatccggttatatcaaagataagtcttaattcttcagtgtattagtcgataaatttcacgttaattaaaacaaatattagccagacgcctcgaatcgagtagactaggcggaagattatttccgtatgggtactgaacgttatgtctactgaaagcgcgtctttaaaaaaccacaatacgtttgcgctcccggtcaacgcagcgcacctgatcatggccgatagaattgagctgatgctcaaggtgtggcaacaaacgcgcaagcgtcaggagccgttgctgattctcggtgaaggtagcaacgtgctgttcctggaggatttttctggcacagtaatggtcaatcagttgaagggtattgatgttcgggaagataacgatgcctggtatctccacgtcagctccggtgaaaattggcatgacctggtgcaatatacgctgcaggccgggatctgcggtctggaaaacctggcgttgattcctggattggccggttccgcccctatccagaacatcggcgcctacggcgtcgaattgaaagacgtctgcgagtatgtcgatctgctggacttctctaccggcgctatcgatcgtattccggctgccgagtgtggttttggctaccgggaaagtattttcaaacaccgtttccagaccggacatgtcattgttgggctgggtctgcgtctcaacaaacagtggcaacccaaattgagctacggcgatctggccaagctggatcctgccacggtgacgccacttcaggtatttgaatccgtatgcgccatgcgccgcagcaagctgcccgatccgcgtgaaaccggcaatgccggcagcttcttcaagaatccgctggtgaacgcagagaaagccgcagaactcatcgctcaatatcccggtatgccgcattatccacagcaggatggccaggtgaagctggccgccggatggcttatcgatcaatgcgaactgaaaggatatcgtatcggtggcgctgcggtacaccgccaacaagcgctggtgctggtgaacatcgccaacgcccacagtcaggatgtggtggcgttggcgcgccacgtacgcaagacggtggctgataaattcggcgtgtggctggaacctgaggtgcgttttattggcgcgaccggtgaactgaatgccgtggcggtgctgtcatgaaagataccaaggttccgttaaaactgatcgcgctgctggctgacggcgaattccattccggtgaacacctcggtgagtcactgggcatgagtcgcgcggcgatcaataagcatattcagaccattcgcgaatggggactggatgtctttaccgtgcccggaaaaggctatagcctgcctggcgccatccagctgttggaagccaagcgaatcctcagcctgctggaagacaagcgtgtaagcgtgttgccggtggtcgattccaccaaccaatacttgctggaccgcatcgacgaattgcactctggtgatgcctgcgtcgctgaataccaacaggctggacgagggcgccgcgggcggcagtggatctcgccattcggtgccaatttatatctgtcgatgttctggcgactggagcaggggccggcagcggctatggggcttagcctggtgatcgggatggtgatggcggaggtcttgcagcgcctcggtgcggctgatgtgcgcgtgaagtggcctaacgatctttatctgaacgatcgtaaattagcggggatcctggtcgaactgacgggaaaaaccggcgatgcggctcaactggtcatcggcgccggcatcaacctggcgatgcgtgataccaatgccagcgccattactcagggatggattaacctacaggaagcgggaattcagatcgatcgcaatgaactggctgcaaccttgcttaatgaactgcgtcagtcattgaaacagtttgagatagacggactcgcgccctttatcggtcgctggcgtaccctggataactttatcgacaggccggtcaagctgctgattggcgagcggcagattgtgggtatcgcccgaggaatcgattcacagggcgcactgctgctggaacaggacggggagatcaagcccttcatcggtggcgagatatcgctgcgcagcgcggaatagtgagaaaagacaaggggacagtaacgtcccctgaatcgatcggtaggcttactttcttaaacgcacgctttcaacggcgtggttagcgcttttggtcattatcaggctggcgcgttcacgggtgggcagtatattctgctgcaaattcaatccgttaatttcattccataattgcgtggcgatattaatcgcctccggttccggcaattttgaataattatggaaataagaatcgggattggaaaatgcgccctgacggaatttcagaaaacgattgatataccagctttgtaatagcgtttccggcgcatcgacatatatagagaagtcgacaaagtcggaaacgaatacgcgatgcggatcgtgaggataatccataccgctttgcaacacgttaagcccttccaggatcagaatatccggttgctcgatgactttattaccttcgggtacaacgtcatagatcaaatgggaataaaccggggcggtgacgcgtttggcgccggatttcacttccgacacgaatttcaccaggctatgcatatcgtaagactgcgggaagccttttttcttcatcaggccgcgttcgttcagcaccttattagggtgcaagaagccgtcggtcgtgatcaactcaacgctgcggtgttctggccaacggctcaacaacgcctgcaacagacgtgcggttgtgctcttacctacggctacgctgccggcgatgccgatgacatagggaatcttttgcccgtcggtgccgaggaattgctcgagcaccgcctgcctacgcaggttggaactgatatagaagttcaacagccgtgacagcggcagataaatctgcgcaacttcttccaacgagagatcttcgttaatccctttcagtttaacgatctcttcttccgacaacgtcagcggcaccgaatctcgcaacgcagcccattgggtacgatcgaactgtaggtaaggcgttgctaaagattgatctctttttatcataagccaaattctgcctgttaacgcaggttgggaaaggcgccggacgccaactccagagaataaacaagctgcatattatagacagcttcgtttttggcgtagacttttttcgcaaaagttgtcgataggcagcagtttatgtcaattgtgcgaagcggcgcgcagttgataaagcggggttgcaaggcggtatcatcagagccggataccgcctgaagactaactggcgatggcgcgcgaaggctgatttacggtgaacagacgtttgtaataaatgacggtcggatggtaatgcccgtcgggacccgctgcataatccggcagctcacccaaacagcgataacccaggctgcgataaagcgcttctgccgccgaaccggcctgcgtatccagatacaatagcccgcgttgctgctgcagtgccgcgtactccagcgtcttcatcagagcctgacctacgccgttgcggcgagcacggctatgcaccaacagcttcaccacctccgcacgattacggccgttcggcttctggcaaagttcgagttgcacggtgccaacgacgccgcgatcgtcacgggcaatccacagcagcagctcacctttggccagggccggtcgcagactgtggaagtagctctcggcgtcttcgtgaggaattaaggtgtcgtaaccgacagaagcgccgtgcgtgacggcatcggtcaacaggcgggccaattcatcgcggtaaattgggagcgtagcggcgttgataggcactattttcatcggtcattcctcctgggatgggggtaatgaagagaagcaataactgagccacagcggcgaaaggcatagcaacggcaaaagggcgagggatcagtgtagcccacgccgcagtccggggcaggtatcccctttttggtgcatcgatcccgctcacagtttaccagcgcgggttaagtgttttgagaagcccgacacggagaaagcggcgctcaaggcttgcaaaaagtggataaaattgtagagaatgattgccgcgagtgatgaatgtttgcacgccgcaggctgcaaattgcatgacagtatgcaaaattgactgatttatgagcgaaagtgcgcgtaaagcaatttttttgttgcataggtcgcccgctctacctagaatgcgctgcacttgatgccggcttagctcagtaggtagagcaactgacttgtaatcagtaggtcaccagttcgattccggtagccggcaccattcaagtcacaagtagttaaaatctggtggggttcccgagcggccaaagggagcagactgtaaatctgccgtcacagacttcgaaggttcgaatccttcccccaccaccaaatcttgccttcggcgattaactgagatgcgataaataccgcaacggttgatggcgggaggagagggcgaaagccttcggcaaggttcgagctgtgcagcgcaaggcgcagccggcccgaaggatgcgagccgagtgatgaacaatcctgctccatcccaaaattctacagaaaaatcaggtagccgagttccaggatgcgggcatcgtataatggctattacctcagccttccaagctgatgatgtgggttcgattcccactgcccgctccaagatgtgctgatatagctcagttggtagagcgcacccttggtaagggtgaggtcggcagttcgaatctgcctatcagcaccacttcttaatttctcgccccctgattttctttctgttctggattcaacgagcaaatgcttggttgatgtggtgataccaccgatttatccgtgtcttagagggacaatcgatgtctaaagaaaagtttgaacgtacaaaaccgcacgttaacgtcggtactatcggccacgttgaccacggtaaaactaccctgactgcagcgatcactaccgtactggctaaaacctacggcggttctgcacgtgctttcgaccagatcgataacgcgccagaagaaaaagctcgtggtatcaccatcaacacctcccacgttgagtatgacaccccgactcgtcactacgcgcacgttgactgcccagggcacgccgactacgtgaaaaacatgatcaccggtgctgctcagatggacggcgcgatcctggtagtagctgcgactgacggcccaatgcctcagactcgtgagcacatcctgctgggtcgtcaggttggcgttcctttcatcatcgtattcatgaacaaatgcgacatggttgatgatgaagagctgctggaactggtagaaatggaagttcgcgaactgctgtccgcttacgacttcccaggcgacgacctgccagtaatccgcggttccgcgctgaaagcgctggaaggcgaagctgagtgggaagcgaaaatcatcgaactggccgaagccctggacagctacatcccagagccagagcgtgcaatcgacaagccgttcctgctgccaatcgaagacgtattctccatctccggtcgtggtaccgttgttaccggtcgtgttgagcgcggtatcatcaaagttggcgaagaagttgaaatcgttggtatcaaagacaccgttaagtctacctgtactggcgttgaaatgttccgcaaactgctggacgaaggccgtgctggtgagaacgtaggtgttctgctgcgtggtatcaaacgtgaagaaatcgaacgtggtcaggtactggctaagccaggctccatcaagccgcacacccagttcgaatctgaagtgtacatcctgagcaaagatgaaggtggtcgtcacacgccattcttcaaaggctaccgtccacagttctacttccgtactactgacgtgaccggtaccatcgaactgccagaaggcgtagagatggtaatgccaggcgacaacgtgaacatggttgtaaccctgattcacccaatcgcgatggatgacggtctgcgtttcgcaatccgtgaaggcggccgtactgtaggcgctggtgttgttgctaaagttatcgcttaatcgctgataaagtttgacgcgacacgcggtaaaagggcatcatttgatgccctttttctacgctgtgaactagaacctatctcatcagcgattttgcagtcataatcattggtgagatgggctcttaaaccgtattgactgaatacgtcatggcgtaaaacaccgggatatcgctcgcgcggtatccgatcggtttggtttgcctcgcaatgcgaggcaaagttgtttgttctgaatcatcattgtgacaggttggtttatgagtgcgaataccgaggctcaagggagcggacgcggcctggaagcggcaaagtggctgatcgtcgccgttctgttggttgtggctattgtcggtaactattactaccgtgatttaagcctgccattgcgcgcgctggcagttgtgctgatcatcgccgttgcaggtgcagtggctctgatgaccaccaaaggcaaagccaccgttgcgtttgcccgtgaagcgcgtaccgaagtacgtaaagtgatttggccaactcgtcaggaaacgctacacaccacgttgatcgttgccgcggtaaccgccgtgatgtcactgattctgtgggggctggatggtattctggtccgtctggtgtcgtttattactggcctgaggttctaaaatgtctgaagctccaaaaaaacgttggtacgtcgttcaggcgttttccggttttgaaggtcgcgtagcgcaatcgctgcgtgaacacatcaaactgcacgatatggaagagctgttcggcgaagtgatggtgcctacggaagaagtggttgaaatccgtggtggccagcgtcgcaagagcgagcgtaaattcttccctggctatgtgctggtgcagatggtgatgaatgacgccagctggcacctggtgcgcagcgtaccgcgtgtcatggggttcatcggcggtacgtctgaccgtcctgcgccgatcagcgataaagaagttgatgcgatcatgaaccgcctgcagcaggtcggtgacaaaccgcgtccgaaaacgctgttcgaaccgggcgagctggtgcgcgtcaacgacggcccgtttgccgatttcaacggcgtggtcgaagaagtcgattacgagaagagccgcctgaaagtttccgtttccatcttcggccgtgcaacgccggtggaactggacttcagccaggttgaaaaaggctgatcgaataatcagcaataagcggtccgttgccgcttgtcaaaggcgcgaaattgaactacaatttcgcgccttttgtttttagatgccttgcctgatgtctgtccggcgaggttaaacacggggagcctctcacgaggcgatactacccaaaccgaggaaatttaaatggctaagaaagtacaagcctacgttaagctgcaagttgcagctggtatggctaacccgagcccaccagtgggtccagctctgggtcagcagggcgttaacatcatggaattctgtaaggcattcaacgctaaaactgacagcgttgagaaaggtctgccgattccggttgttatcaccgtttattctgatcgctccttcactttcgttaccaaaaccccgccagcagcagttctgctgaaaaaagcggctggtatcaagtctggttccggtaagccgaacaaagacaaagtaggtaaagtgacccgtgctcaggtacgtgaaatcgcagaaaccaaagctgcggacatgactggttctgacgttgaagcgatgactcgctccatcgaaggtaccgctcgttccatgggcctggtagtggaggattaagagatggctaagctgaccaagcgcatgcgcgtgatccgtgacaaagttgatgctactaaacagtatgacatcactgaagctgttgctctgctgaaagagctggccaccgctaaattcgtagaaagcgttgacgttgccgttaacctcggtatcgacgctcgtaaatctgaccaaaacgttcgtggcgctaccgttctgccacacggcaccggtcgttccgttcgcgttgccgtatttacccaaggcgctaacgctgaagcagcgaaagctgccggcgcagagctggtaggtatggacgatctggctgagcagatcaagaaaggcgaaatgaacttcgacgttgttattgcttccccggatgcaatgcgcgttgtaggtcaactgggccagatcctgggtccacgcggcctgatgccaaacccgaaagtgggtaccgttactccgaacgttgctgaagcagtgaaaaacgctaaagcaggtcaggttcgctaccgtaacgacaaaaacggcatcatccataccactatcggtaaggttgatttcgacgcagacaaactgaaagaaaacctggaagccctgctggttgcgctgaaaaaagcaaaaccttctcaggcgaaaggcatgtacatcaagaaagttagcctctccaccaccatgggtgctggcgttgctatcgatcagagcggtctgtctgccgcagcgaactaatcgcacttgcgattatcgctttgacttggggccgagatttgtctagaatcttatgccccaaggttttgctattggctatgccgtaggcaaaacaaagatttttcggttggagcctggcctatccaggcctccgtccaagaccgcaggtgtatcgcgagatacttaatccttcctgcgtagacggtgacagagcctaagaaaatttttcttttttataaaagaatgtctttgctggattctgctcaccgtgttaagccgctcggcgtggcgttttacaaagcgccgagtgaagtgagttccgggggattttccccggctaatccaggagcaaaaagctaatggcattaaatcttcaagacaaacaagcgattgttgctgaagtcagcgaagtagccaaaggcgcgctgtctgcggttgttgcggattcccgcggcgttaccgtagataaaatgactgaactgcgtaaagcaggtcgtgaagctggcgtttacatgcgtgttgttcgcaacaccctgatgcgtcgcgtagttgaaggcactccattcgaatgcctgaaagacacgtttgtcggtccaaccttgattgcattctctcacgaacacccgggcgctgctgctcgtctgttcaaagagttcgcgaaagcgaatgcaaaattcgaggttaaagctgcggcctttgaaggtgagctgatcccagcggcgcaaatcgaccgcctggcgacgctgccaacttacgaagaagcgatcgcacgcctgatggcaaccatgaaagaagccgctgccggcaaactggttcgcactctggctgcagtacgcgatcagaaagaagcggcgtaagccactctttcttagcctttgctaacgtatttaaactatttctgaattttaggaacaattgttatgtctatcactaaagaccaaatcctggaagcagttgccgctatgtccgtaatggacgttgttgaactggtttccgctatggaagaaaaattcggcgtttctgctgctgctgctgtagctgtagctgctggcccagctgaagctgctgaagagaaaactgaattcgacgttatcctgaaagctgcaggcgctaacaaagttgctgttatcaaagcagtacgtggcgctaccggcctgggtctgaaagaagctaaagacctggttgaatctgctccagccgctctgaaagaaggcgtgagcaaagatgacgcagaagctctgaaaaaatctctggaagaagctggcgcagaagttgaagttaaataagccaacctttccggttgcagcctagtcttttaggctgatggctggtgactttttagtcaccagcctttttgcgctgtagggcgccagtagcgtttcacactgtttggctgctggtttcgcctcccaatgtttgtttctattgacgacttaatataccgcggtctttgcactaccaggagttctgggggaaggcgcgatgaaatggtttaagcgtgatagcaagagacattgcgggaagtgttcccgctttccggtcgacaaaacggtgttgcatgaactgtccctaatcggacggacagattgggtcactgatcagcgagctgaggaaccctatggtttactcctataccgagaaaaaacgtattcgtaaggattttggtaaacgtccacaagtgctggacataccatatctcctttctatccagcttgactcgttccagaagtttatcgagcaagatccagaagggcagtacggccttgaagccgcattccgttctgttttccctatccagagctacagtggcaattcggagctgcaatacgttagctaccgtcttggtgagccggtcttcgacgtcaaagagtgccagatccgtggtgtgacgttctctgcaccgctgcgcgtaaaactgcgcctggttatctatgagcgcgaagcgcctgaaggtacggtcaaagacatcaaggaacaagaagtctacatgggcgaaattccgctcatgaccgaaaacggcacctttgtgatcaacggtactgagagggttatcgtatctcagttgcaccgtagtcctggcgtattcttcgacagcgataagggtaaaacccattcctcgggtaaagtgctgtacaacgcacgtatcatcccttaccgcggttcatggttggacttcgagttcgatccgaaagacaacctgttcgtgcgtattgaccgtcgccgcaaactgcctgcgaccatcattctgcgcgcgctgaactacaccactgaacagatcctcgacctgttctttgacaagatcgtcttcgaaatccgcgacaacaagctgcagatggagctggtgcctgagcgcctgcgtggtgagaccgcttcgttcgatatcgaagccaacggcaagatctacgtagagaaaggccgtcgtatcaccgcccgtcatatccgtcagctggaaaaagacgacattcagagcattgaagtaccggtagagtacatcgcgggcaaagtggtcgcgaaagactatatcgataccaataccggcgaactgatctgcgcagccaacatggagctgtcgctggatctgctggccaagctgagccagtccggccacaagcgcatcgaaacgctgttcaccaacgatctggatcacggcgcgtatatctctgaaacgctgcgtgtcgatccgaccaacgatcgtctgagctcgctggtagaaatctaccgcatgatgcgtcctggtgagccgccaacgcgcgaagctgccgaaagcctgttcgagaacctgttcttctccgaagaccgctacgatctgtccgcagtcggccgtatgaagttcaaccgttctctgctgcgcgacgagatcgaaggttcgggcatcctgagcaaagacgacatcatcgaagtgatgaagaagctcatcgatatccgtaacggcaagggcgaagtggacgatatcgaccacttgggcaaccgtcgtatccgctccgtcggcgaaatggccgagaaccagttccgcgtaggtctggtgcgtgttgagcgtgcggtgaaagagcgtctgtctctgggcgatctggataccctgatgcctcaggacatgatcaacgccaaaccgatttcggcggcggtgaaagagttcttcggctccagccagctgtcccagttcatggaccagaacaacccgttgtccgagatcacgcacaagcgtcgtatctctgcactgggcccgggcggtctgacccgtgagcgcgccggctttgaagttcgagacgtacacccgacccactacggccgcgtgtgcccaatcgaaacgccggaaggtccaaacatcggtctgatcaactccctgtccgtgtacgcacagactaacgagtatggcttcctggaaaccccgtaccgccgcgtgcgcgacggcgtggtgaccgatgaaatcaactacctgtctgctattgaagaaggcaacttcgttatcgcccaggcgaactccaacctggatgaagaaggccgcttcgtagaagacctggtcacctgtcgtagcaaaggcgaatcaagcctgttcagccgcgaccaggttgactacatggacgtatccacccaacaggttgtttccgttggtgcctcactgattccattcctggaacacgatgacgccaaccgtgcattgatgggtgcgaacatgcaacgtcaggccgtaccaaccctgcgcgctgacaagccgctggtcggtaccggtatggaacgcgctgtagcggttgactccggcgtaaccgccgttgccaaacgcggcggtgtgatccagtacgtggatgcttcccgtatcgttatcaaagttaacgaagacgagatgtacccgggcgaagcaggtatcgatatttacaacctgaccaagtacacccgttctaaccagaacacctgcatcaaccagatgccgtgtgtgaatctgggtgagccaatcgagcgcggcgacgtgctggcggatggcccatcgacagacctgggcgaactggcgctgggccagaacatgcgcgtagcgttcatgccttggaacggctacaacttcgaagactccatcttggtctccgagcgcgtggtgcaggaagatcgcttcaccaccatccacatccaggaactggcgtgcgtgtctcgcgacaccaagctggggcctgaagagatcaccgccgacatccctaacgtgggtgaagctgcgctctccaagctggatgaatccggtatcgtgtatatcggtgctgaagtgaccggtggcgacattctggtcggtaaggtaacgcctaaaggcgaaacccagctgacgccggaagagaaactgctgcgtgcgatcttcggtgagaaggcgtctgacgttaaagactcttctctgcgtgtgccgaacggcgtttccggtacggttatcgacgtgcaggtcttcacccgcgatggcgtggaaaaagacaagcgcgcgttggaaatcgaagagatgcagctgaagcaggcgaagaaagacctgactgaagaactgcagatcctggaagctggtctgttcgcacgtatccacgcggtgctggttgccggtggcatcgaagccgacaagctgagcaagctgccgcgcgatcgctggctggaactgggcctgaccgacgaagagaagcaaaaccagctggagcagctggctgagcagtacgacgaactgaaatccgacttcgagaagaagctggaagccaagcgtcgtaagatcactcagggcgacgatctggcgccgggcgtgctgaaaatcgtcaaggtttatctggccgttaaacgtcagatccaaccgggtgacaagatggcgggccgccacgggaacaagggtgttatctccaagatcaacccgatcgaagatatgccttacgatgaaaacggcacgccggttgacatcgtactgaacccgctgggcgtaccatcacgtatgaacatcggtcagatcctggaaacccacctgggtatggctgcgaaaggcatcggtgagaagatcaaccagatgctgaagcagcagcaggaagtggccaagctgcgtgagttcatccagaaggcctacgatctgggcgacgacgtttgccagaaagttgacctgaacaccttcagcgacgacgaagtgctgcgtctggcagagaacctgaaaaaaggtatgccgatcgcaacgccggtgtttgacggtgcgaaagagactgaaatcaagaagctgctggaaatgggtggtatcccgacctccggtcagatcacgctgttcgatggccgtaccggtgagcaattcgagcgccaggttactgttggctatatgtacatgctgaaactgaaccacttggttgacgataaaatgcacgcccgttcaaccggttcttacagcttggttactcagcaacctctgggtggtaaagcgcagttcggtggtcaacgcttcggtgagatggaagtgtgggcactggaagcatacggcgcggcttataccctgcaggaaatgctcaccgttaagtcggatgacgttaacggccgtaccaagatgtacaaaaacatcgtggatggcgaccaccggatggagccaggcatgccggaatccttcaacgtactgttgaaagaaatccgctcgctcggcatcaacatcgaactggaagacgagtaatcgtcatgccggctcaggctccccgcctaagggagcctgagggtggttgttcaggtcacacgggtacctactgcggttgtgggtacccaacaggtttaactccgacaggagccaatccgtgaaagacttattgaagtttctgaaagcgcaaactaagaccgaagagtttgatgcgatcaagattgctctggcctcgccagacatgatccgttcgtggtcgttcggtgaagttaagaagccggaaaccattaactaccgtacgttcaaacctgagcgtgacggccttttctgcgcccgtatcttcgggccggtaaaagattacgagtgcctgtgcggtaagtacaagcgcttgaaacaccgcggcgtgatctgtgagaagtgcggcgttgaagtgacccagactaaagtgcgccgtgagcgcatgggccacatcgagctggcttccccgactgcgcacatctggttcctgaaatcgctgccatcccgcatcggtttgctgctggatatgccgctgcgtgacatcgaacgcgtactgtacttcgaatcctatgtggtggtcgaaggcggtatgaccaacctcgagcgtcgtcagatcctgactgaagagcagtatctggacgcgctggaagagttcggtgacgaattcgacgccaagatgggtgcggaagccattcaggccctgttgaaaaacatggatctggaagccgagtgcgagcagctgcgtgaagagctgaacgaaaccaactccgaaaccaagcgcaagaagctgaccaagcgtatcaagctgctggaagcgttcgtacagtccggtaacaagccggagtggatgatcctgaccgtgctgccggtactgccgccggatttgcgtccgctggttccgctggatggcggccgtttcgcgacgtcggatctgaacgatctgtatcgccgcgtgatcaaccgtaacaaccgtctgaaacgcctgctggatctggctgcgcctgacatcatcgtgcgcaacgaaaagcgtatgctgcaagaagcggtagacgccctgctggataacggccgtcgcggtcgtgccatcaccggttccaacaaacgtcctctgaaatctttggccgacatgatcaaaggtaagcagggtcgtttccgtcagaacctgctcggtaaacgcgttgactactccggccgttccgtaatcaccgtaggtccatacctgcgtctgcatcagtgcggtctgcctaaaaagatggcgctggagctgttcaaaccgttcatctacggcaagttggagctgcgtggcctggccaccaccatcaaagccgccaagaaaatggttgagcgtgaagaagccgtcgtttgggatatcctggacgaagtgatccgcgaacacccggtactgctgaaccgtgcaccaaccctgcaccgtttgggtatccaggcgtttgaaccggttctgatcgaaggtaaagcgatccagctgcacccgctggtttgtgcggcctataacgccgacttcgatggtgaccagatggccgttcacgtaccgctgacgctggaagcccagctggaagcgcgtgcgctgatgatgtccaccaacaacatcctgtccccagcgaacggcgagccaatcatcgttccttctcaggacgttgtactgggtctgtactacatgacccgcgactgtgttaacgccaagggcgaaggcatggtgctgaacggttccaaagaagctgagcgcgtataccgcgccggcctggcgtcgctgcatgcgcgcgttaaagtgcgtatcaccgaagacgtcaagaacgccgaaggcgagtggacctctcagaccagcatcatcgacaccaccatcggccgcgccatcctgtggatgatcgtaccgaaaggtctgccgtacgcgatcgttaaccagcctttgggcaagaaagcgatctccaagatgctgaacacctgttaccgcatcctgggcctgaagccgaccgtaatctttgctgaccagatcatgtacaccggttttgcttacgcagcccgttccggcgcttccgtaggtatcgacgacatggttatcccggccaagaaagcggagatcatcgaagaagcggaaaccgaagttgccgagatccaggagcagttccagtctggtctggttaccgccggcgaacgctacaacaaagtgatcgatatctgggctgccgcgaacgaacgcgttgcgaaagcgatgatggaaaacctgtcggtagaagacgtggttaaccgtgacggcgaagtggaacagcaagtttccttcaacagcatctttatgatggccgactccggtgcgcgtggttccgccgctcagattcgtcagctggccggtatgcgtggtctgatggcgaagccggacggctccatcatcgaaacgccaatcaccgcgaacttccgtgaaggtctgaacgtactccagtacttcatctccacccacggtgctcgtaaaggtctggcggataccgcactgaaaaccgcgaactccggttatctgacccgtcgtctggttgacgtggcgcaggacctggtggtgaccgaagacgactgtggcacccacgacggcatcctgatgactccggttatcgaaggtggcgacgtgaaagagccgctgcgtgaacgcgttctgggccgtgtgacggcagaagacgtcctcaagccgggtacggcggacattctggtgccacgcaacaccctgctgaacgagaaggcgtgtgacctgttggaagagaactctgtcgacagcgttaaagtccgttccgtggtgagctgtgaaaccgacttcggtgtgtgtgctaactgctatggtcgcgacctggcacgtggccacatcatcaacaaaggcgaagccatcggcgttatcgcggcacagtccatcggtgagccgggtacacagctgacgatgcgtacgttccacatcggtggtgcggcatctcgtgcggctgctgaatccagcattcaggtgaaaaacaagggtagcatcaagctgagcaacgcgaagttcgttatgaacgccgcaggcaagctggtgatcacctcgcgtaacaccgaactgaaactgatcgacgaattcggccgtaccaaagaaagctacaaggtgccttacggcgccgtgatgggcaaaggcgacggtgaagaagttaacggcggcgaaaccgtcgctaactgggatccgcacaccatgccggtcatcagtgaagtcagcggcttcattcgcttcgccgacatggtcgacggccagacgattactcgtcagaccgacgaactgaccggtttgtcttctctggttgttctggacagcgcagagcgtaccggtagcggtaaagacctgcgtccggcactgaaaatcgttgacgctcagggcgaagacgtattgatcccaggtactgatatgcctgctcaatacttcctgccgggcaaagcgatcgttcagctggaagacggcattcagatcggtgcgggtgataccctggcgcgtattcctcaggaatccggcggtaccaaggatattaccggtggtctgccgcgcgttgccgacctgttcgaagcgcgtcgtccgaaagagccggcaatcctggctgaaatcagcgggattatctcgttcggtaaagagaccaaaggcaaacgtcgcctggtgatctctccgctggacggcagcgacgcttacgaagagatgattccgaaatggcgtcagctcaacgtgttcgaaggcgaagtggtggaacgtggcgacgtcgtttccgacggcccagagtctccgcacgacattctgcgtctgcgtggcgtgcatgcggttacccgctacatcaccaacgaagtgcaggaagtttaccgtctgcaaggcgttaagattaacgataagcacatcgaagttatcgttcgtcagatgctgcgtaaaggcactatcgttagcgctggtggctccgagttcctggaaggcgagcaggctgaagtgtctcgcgtcaagattgccaaccgtcagctggaagctgaaggtaaaatcgcggcaaccttctcgcgcgatctgctgggtatcaccaaggcatccttggcgaccgagtccttcatctccgccgcatcgttccaggaaacgacgcgcgttctgaccgaagctgccgtagccggcaagcgtgatgaactgcgtggcctgaaagagaacgtcatcgtgggccgtctgatcccagccggtaccggttacgcttatcatcaggatcgcatgcgtcgccgtgctcagggtgaagcgccggttgttccgcaagtcagcgcggaagaagcgacggctaacctggccgagctgctcaacgcaggcctgggcggtagcgacgacgagtaatcgtcatccgcgccgcgggcccggtatgccgggcccatcgccagataaaccgctccctcgggggcggttttttttcgcctcatgccggggccgagcaaactttgctactatggttacagcagaaattgaccggcgcttttaccagacaaccaaggacagtgcgaatatggacagcctcattaccttcgaaaaattgacggcacaacacctgccttacctgtatgagatccgcttttccgttgaagaaaacctgctgcatccgcatcagatccagtatctgcagcgcaggcaggcgctggaggacatcaaccagggcggcggctggatctgcaagcatggcgacgactatgccggcgttggcttcgggttattcatccctgaaccgttgatcggcggcctgttcgtgaagccggaataccagtcgaaggggatcggctccgccttgttggcgcgagtcaccgcctggatgtttgagcgcggcgccgaagcgatccacttaaccaccgatccgggctccaaagccgaaggcttttatcaacatcacggctgggccgtggtcgggcaggatgagttcggccaggccgaactggtgaaatgcaaagagggtgaataatgacaatcaaaggattgatgacgttactgctgctttcgctgttcagcgcaccgctgtatgcggccgttgactatttttacctgaaaccgctcgatggtgagaagatcaagataaccaggcagatgctggaggcgatgccgcatcacacgattaaaacctcgaccaatttcaccccggaagatacgttcaccggcgttgagtttgcagagttagtgaaagcctaccacctgaaaggccagtcagtgcgcgctttcgcctgggatgattactcctattcgatgccgattgacgagatgattaaataccgtgtgatcgtcgcctaccagcgcggcggcaagccgatcgacgttggtgagctggggccgttcgccattatttatccgcgggatggctatgccgagctgaataacctggatgtgaatgcgaaaaccgtctggcaagtgaaacggttggagctgaaataagatgagcaaaaaactgatcggtactcttatcgcgttggttgccatcttctccttattgattttgttgattgccattaacttcggcggcgtaaaagagcgctataagcagatcgagcccaatctggacaactactcggtggccgagatcctgtttctggcgtttgaaaggaccaaaatcgcgctgttgctcagtgaaaacaacgactacgacgccttccagatcaaaaagaaaatcttctactcgaagattcagatcctggagagccgttcgaccttcagcgactctttttattacgacgacgagttcatcaaaaatgttgcgctgctgaagcagcagtatcgcacgttggacgatctttctgccggcttgctggtggggctgaaaaacaaggcggacattctctcttatatggatgatatcgagggtacgctggtcgatatccaggaaattatttatcggatacagattaaaaactttaccgaagtgaaaggcatcatccaggacaactcgagtaaagccgagatgttcgccctcttttcgctgattttagtgttcctgatgatgttcctggtgctgagaaacgccttctcgttgaaagagatcatcaagaacaagaacatctttatctcttccatctaccacgagatcgccggctcgacccaggccatcgtcattgccgcggatatcatggaacatgagctggcgcaggaagagttgaaaaaagaagcccgcctgatctcctatcacggtaacaagatcgccgaacaaacgcgcgaggtgatggattattctcggcttgagatgggagaagttaaaatcaatatttccaccttccggctgaatgaggtggtggccgatgccgtaaccggcatcggcgccgggcgaggcaatcgcctcgtgatccaccgttcgtcttatgccggcctgattggttctgataaatacaagctctaccgaatattggccaacctgctcagcaacgcggataagtttacccaccacggcgcgatcgccctcaatgtgaaggtgtgtcacggcaatctgtatttacgggtaaaagacaccggcatcgggtttaacgtcgataatctggatcggttatataaggcgttcaatcagggggtagaaagggagacgcggcagggattagggctggggctgaccattatcaaaaattacgtcacgacgatgaaaggcaccatcaaggtcaaatccgtcgaagggggtggctcatcgtttttgatccgcattccggtcaaactaattaaagaataggttcgacagcaatagcgaagagataatcagcggcttggtcggtttttccaccaggtgcacgtcatagtgcaggatcatatcgccgatgtttttctcgtagtgattcagctggccggtcagaatgatgatgcgggcgtgcggatcgagggcgtctttaattttcttcaccacgcgttcggaagtctcgccgaagtccaacagccagtccaaaataaacgcctcaaaggactgctgctccagcgcggccagcatggcgtccgccgtctgaaaggtctcggtctcgatgccgtagcggctggcgatcttcttcaacagttcgagaatatcgccgtcattatccaggatcgcgatgcgcggggccggcagaaagtctatcttgttgactttatacagcggggcatcggctgcatattcccgattggtgttgatgatgaaaagatcgtcctttttgtaggcgtaagtttcgtcgttgtccgcttgcgtgaccgggcgctcgtcggcctcaatgttacagcgcttgtgaatgctgttcatgataaacacgccgttatgtgtcctttggccggcaaacggctcgttgaagtactggaaaacctttttgacttcatcgagggtgatgccccttttgccatccagcttctgtttggcgctgttgtactgaaggttcagtatgttggccatcgtggaggcatgttttctgtcgccaactcctttcagagtgagcaacgcgctgattgcatcgatgtaatttggcgttttcttcatgacaaccttggcttttttgatgttaaccgcgagcgttggaaaacctgcgtgaggacccgtgctggattatagatgaagcctcggttattgcggtgatatcagtttgattttccttggcaaactcaaaacacactcgatgacaaataaaaaaacactcaaaagacattcacatttaaccgtttatgtggttaattagcgcacatactgtgtgattcgcgtcctgggggggtgccagtctcacaaaataaaccgcctgctcttgtccgtaagcagggagcaggcggcaaaaagatccgcggccgacaccagggccattggcagcaccggggatggctactcgaacctctcttcgtcgctctgtaccttcttttttcctctttccccacttttctgccgcaacagcgtcctatgagtctcaccgctgagtgagtgtcgagcaccgttatgccacagtcctttagccgacaaggcacctgcccgtacacccttacaggccgcgatacgccatatgcgcgttgctgcggagagggcccggagtcgcgcaagagaatctccggcgcgatccggggggataaggcggggccatcgagagggagacggccccggccggcgccgggtttggcggccggcaaggtcactataatcggcgcgtttgtcggcgccagcaccaccgttcggcattgcgcggccgctccagcgttttcttcacgcggcggtaaacgttgccgcttattgcgcgccgcgtcccagataaccgtcccagtctttccacaccggctgcagcccggcgttgctgatggcctcggcgacctgctgcggcgtgcggccgtcgtgcggttcgaactgttccagctccggcggcacgtcatcggcatagccgccgggctgcgtcttggatccggcgctgacgctgttgatcgccaccgggatcatatgatcgcggaagtacggcgactcacgcgtagacagcgacagctcaacgtccggcgcgaacagccggaaggcgcagatcagctgcaccagttgaggctcgctcatgatcgacgccggctcaatgccgccggcgcaggggcgcaggcgcgggaacgagatcgagtagcggctctgccagtaggtttgctgcaggtaaaacagatgttccgccagcaggtagcagtcggtgcgccaactgttggacaggccgatcaacgcaccgaggccgatcttgtcgatcccggcgcgccccaggcgatccggcgtggccaggcgccaatggaaatcctgcttctggccgcgcaggtgatgctgcagataggtggccggatggtaggtttcctggtacaccagcacgccgtccaggcccagcgttttcagttcggcgtattcctcctgcgccaacggctgcacttccatcatcagcgagctgaagtgtcggcggatcgccgggatgtgctggcggaaatagtccatgccgaccttggtctgatgctcgccggtgaccagcaacagatgttcgaaccccagcgcctggatggctgcgcactcgcgggcgatctccgccgcatccagcgttttgcgcttgatgcggttgctcatcgaaaagccgcagtaggtgcagtcgttggcgcacaggttagagaggtacagcggcacatagaagctgacgacgttgccgaatcgctgacgggtcagctgctgcgcgcgctgcgccagcggttccagatacggcgcggcggcgggggagatcagcgccataaagtcgtcgcgcgtcagcttgtcggcgttcaacgcgcgttccacgtcgcgcgcggttttgccgttgatgcgcagcgtaatgtcgtcccaatccagctgttgccagcggctactgaaatcgtcggccatcactgtgcctcctctggctggctgaggaaggcggtcagcgggctcgaggcgaccgcgccgcgctggctgacgcccaatccggcgctgcgcgccaattcgccggcctccagcgccaggcgaaacgcccgcgccatttgcaccgggtcgcgcgccacggcgatggcggtattcaccagcaccgcgtcggcgcccagctccatcgcttccagcgcatggcttggcgcgccgatgccggcgtcgaccaccaccggcaccttggcctgttcgatgatgatctcgaggaagtcgcgggtgcgcagaccgcggttggaaccgataggggcgccgagcggcatcaccgccgcgcagcccgcctcttccagccgtttgcacagcaccggatcggcgccgcagtagggcagcaccacaaaaccgtctttcaccagcgtttccgccgccttcagcgtttctatcggatccggcagcaggtatttcacatcggggtggatctccagcttcacccagtgggtgccgagcgcttcacgcgccagccgggcggcgaataccgcttcggcggccgttttggcgccggaggtattgggcaacagcctgacgcccaactgttgcagcggcgccaaaatggcgtcgttgccgccgcgcagatcgacgcgcttcatggccatggtcaccagctgtgagccggaggccgccagcgcctccaacatcagcgccggggtggcgaacttgccggtgccggtgaacaggcgcgaggtaaaagtggtatcggcgattttcagcatgtcagcctccggcgatcgcttgaaacagcaaaatgtcgtcaccgtcctgcacctgatggtcggcccagtcggcgcgcgggatgatggtttggttgatcgccagcgcggtacccggctggtggcgttccagctgggccagcagggcggcgacgctgagcggctgcggcagctccagcggttggtcgtttaaacggatcttcatgccgcgcctccgcataccgggcaggcacgggcctggctcagttgcagcgtgctccagctctgctgcttgccgtcgaacagccgcagtttaccgctgagggaagaaggcatgccggccagcatcttgatggcctccagcgcttgcagggtgccgatcacgcccaccaccggaccgagtaccccggcggtgcggcagttgcgctgcggctcttcctgctccgggtacaggcaggcgtagcagccgtgcgcatagggcggctcgagcaccagcagctggccgctgaagccgaccgcgctgccgctgatcagcggcttggcggcggcgatgcaggcggcattgacctcatggcgggtcgccatattgtcgcagcagtccagcaccagatcggcgcgtgcgaccgcgtcgcgcagcgcttgcccttgcagccgctgcgccagcgggatggattccaccaacgggttcagcgcctgcaggtggcgttgcgccagcgccgccttgccggtggcggtatcggcgctgcggtagaggatttgccgctgcaggttggtgacgtgcagctggtcgtcgtcggccagcagcagcgtgccgacgccggcggcggccagatacagcgaagccggggaaccgagcccacctaaaccgacgatcagcaccgtggcgcgcttgagtctctcctggccttccgggccgacgtcctccagcagcagctggcggctgtagcgcaggaattcctgatcgttaagcatcgttcggatcctcgccttcgatcagccgcagcagctcggccgtcgccgcgcgccagtccggcgcctgggtgatggcgctgaccaccgccacgctgccgacgccgcacgccagcaccgccggtacgcgatcgatactgatcccgccgatcgccaccgtcgggtaatccgccaggccggcgatgtggcgtttcaactccgtcagcccctgcggcgccgaaagcatgtctttggtttgggtggggaagatgtgccccaacgcgatgtaggacggtttcaccgccagcgcgcgcgccagctccgcgtcgtcatgggtggacacgcccagccgcagcccggcgcggtgaatggcagccagatcggtggtatcgagatcttcctggcccagatgcacgccgtaggcgccgtgcttgatcgccagccgccagtagtcgttgatgaacagccgcgcctgataacgccggcccagcgcgatggcggcagcgatatcctcttcgacctgctcgtcaggcaagtccttgatgcgcaactggatagtggtgacgccggcctccagcaggcgagcgatccattccacgctgtcgacgaccgggtagagccccagtttgtagggcgtcgccgggaagggcgtcgtgatatcagtcattgctggtctcctcctgcaaattgccggcgctgtgatacagctcgctgccgcgggcgcggaactcggcggacattttctccataccggtcagctgcacctcgatcggtttggcggcctcttgggcagcggcgtagtcgcgcacctcttgtgaaatcttcatcgagcagaattttggtccgcacatcgagcagaagtgggcgatcttgccggattcctgcggcagggtttcgtcgtgataggcgcgcgcggtggccggatcgagcgccagattgaactgatcttcccagcggaattcgaaacgcgccttggacatggcgttatcgcggatctgcgcgcccggatggcctttggccagatcggcggcgtgagcggcgatcttgtaggtgatcaggccctgtttgacgtcctctttgttcggcaggccgaggtgttctttcggcgtgacgtaacacagcatggcgcagccgaaccagccgatcatcgccgcgccgataccggaggtgaaatggtcatagcccggggcgatgtcggtggtcagcggaccgagggtgtagaacggcgcttcgtggcagtgttccagctcttcggtcatgttgcggcggatcatctgcatcggcacgtggcccgggccctcgatcatcacctgcacgtcgtattcccaggcgattttggtcagctcgcccagcgtatgcagttcggcgaactgggcttcgtcgttggcgtcctgaatcgagccggggcgcaggccgtcgccgagcgacagcgagacatcgtaggcggcgcagatctcgcagatttcacggaagtgctgatagaggaagttttcctgatggtgcgacagacaccatttggccatgatcgagccgccgcgcgacacgatgccggtcaggcgtttggcggtcatcggcacgtagcgcagcagcacgccggcgtggatggtgaagtagtcgaccccttgttccgcctgttccagcagcgtatcgcggaacatctcccaggtgaggttttccgccacgccgttgaccttctccagcgcctgataaataggcaccgtaccgatgggcaccgggctgttgcgcaggatccattcgcgggtttcgtgaatatagcggccggtggagagatccatcacggtgtctgcgccccagcgggtggaccacaccagtttctccacttcttcttcgatcgacgacgtgaccgccgagttgccgatattggcgttcaccttcaccaggaaattgcggccgatgatcatcggctccgcctccgggtggttgatattggcgggaatgatagcgcggccggcggccacttcctggcgcacgaactccggcgtgatgttgtccggcaggttggcgccccagccctggcccggatgctggtggcgcagcacctcgccgcgaatgcgttcgcgccccatgttttcacggatggcgatgaattccatctccggggtgacgatgccggcgcgggcgtagtgcaactgggttacgcacttgcccggcagcgctttgcgcggcagcggcaggtgttcgaaacgcaggtgatcgagaccttcgtccgccagccgctgctgggtgaagccggagctggcaccgctcagggtggcggtatcgccgcgtgcgtcgatccagccggcgcgcagcttggccaggccggcgtgcacgtcgagctcggcctgtggatcgccgtacgggccggcggtgtcatacaccgggatcgcctcgttctgttcatactgcgggttatctttgctgccgccgaccagggtcgggctgagctgaatttcacgcatcggcacctggatatcgcggcgcgaaccctgcaggtagatgcggcgtgagtttgggaaagccatgccttgcagggtgtcgataaactgctgggcggcttcgcgttgcgctttacgggcgcgcggtggattaacgttagacatagcaagttcctaccagtgtgttgggttgggaaagttgcttgtctggagctcggagggagtaatgatggtggccgataaggcagggcgcccgcaaggggaaggccgtgtctgtggcgatagattactcttgttcccttcgcgggtattaacccgatcaggttccgcggatcccgaattaacggtctcagcctggctgattcgatgaacaaatcaggcgctaggcactccgacaagatgccccccagtataggagggataagaaaaaaaactataaaattttaacgcgccggatccagcgcctggtccggcagcggttgctgcgtggcttccgcttccagcaggatcagcttatcttccagcgcaaagcgcgccgccagcgtttcgccgatatccgacaaggcctgatggaattccagacaaacctcctgatcgatatccacttcggtatagcgatcgtggaacgccatgatctgttcggtattggcccatagcttggggtagatgttcaccgccagcgacattttcggactggctgcgccttccacttgtttgataattctgtcatagatatgaaaatgccctgcggagaggtaatccaccaggttatggcaaaagttctccagcgctttttcattcagcggcgtatgcttttctttattcggtttgaggcctaccagcgtgcagtaggcgaccagcaactgcttgcgggcctgaagccattgatcaactaattcattactaccgccaacgcgctgagtcagcctttccaaacggttgagcatgtttgactccgtgtaagtaacaaaagtaaccggtaagttattaaaatgtaacaaagccgatttgtagagtgccagtgaagctgaggttgtgcaacaacgatatggaacttgcattaacgggcaatgaaaacggctggtggatcgtcagccatgaaagcaaactttggttaccgaacggtgaattgccgtcggggaccgccgccgccctcgggctgcagggccacatggcgcgcgtcatcggtgagtgggagggcgcgccggtctggctggtgcgccaggcgatgccgcgggagatggggtcggtgcgccaactgctggatcaggatcgcggtctgttccagcttgccgggcgcggcgtgcagctggcggatttctaccgctcccatcgctattgcggctactgcggccatgagatgcacctcagccgcaccgaaagcgcctgcctgtgcggccattgcaaggagcgctactacccgcagatcgcgccctgcgtgatcgtcgccattcggcgcgaggatcagatcctgctggcgcagcacgtgcgccatcgcggcggcattcacacggtgctggccggtttcgttgaagtgggcgaaacgctggagcaagcggtggcgcgcgaagtgatggaagagagcaatattgaaatcaagaacctgcgctacgtcacgtcacaaccctggccgtttccgcactcgctgatgatggcctttatggccgattaccaccagggtgagattcgtcacgatcctaaggagctgctcaacgccggctggtatcgttacgaccaactgccgctgttgccgccgcccggcaccgtggcgcgccgcttgattgaggacaccgtggcgctgtgccgggcagaataatgtacaatggccggcagattattaagggagccccataaatgactgagttgaagaacgatcgttacctgcgcgcgctgttgcgtcagccggtggatgtgacccccgtatggatgatgcgccaggccggtcgttatttaccggagtataaggcgactcgcgcccaggccggtgattttatgtcgctgtgcaagaacgcggagctggcctgcgaggttacgctgcagccgctgcgccgctacgcgctggacgccgccatcctgttctccgacattctcaccattcccgacgccatggggctcggcctgtactttgaagccggcgaaggcccgcgtttcagctcccccgtcacctgccgcgccgacgtcgacaaactgccggtgttcgatccggaagtggagctgggctatgtgatgaacgcggtgcgcaccattcgccgcgagctgaagggcgaagtgccgctgatcggcttctccggcagcccgtggacgctggctacctatatggttgagggcggcagcagtaaggcattcaccaagctgaagaagatgatgtatgccgagccggccacgttgcacctgttgctggacaagctggcggacagcgtgatcctttacctcaatgcccagatcaaggccggcgcgcagtcggtgatggtgttcgacacctggggcggcgtgctgaccgggcgcgattaccgcgagttctctttgcactacatgcacaagatcgtcgatggcttgctgcgtgaaaacgacggccgccgcgtgccggtaacgctgttcaccaaaggcggcgggcagtggctggaggcgatggccgccaccggctgcgatgcgctggggctggactggaccaccgacatcgccgacgcgcgccgtcgcgtaggcgacaaagtggcgctgcagggcaatatggatccgtcgatgctttatgcttctccggcgcgcatcgcggaagaagtggagaccattctggccggtttcggccacggcaacggtcatgtgttcaacctgggccacggcatccatcaggatgtgccgccggagcacgccggggccttcgtcgaggcggtacacgcgcagtcggcgaaataccaccgttaaggatccgatgtgaccgatatggcggctctgcgcgccgaacagctgcggcgcgccgctgaagtcattcgctacgacgagctgccggccgaaccgccggcgttcatcgccggcgccgatgtgggcttcgagcaagagggcgcggtgacgcgcgccgccatcgccatcctgcgctatccgtcgctggagctggtggagtatcaggtggcgcgcatcgccaccgtcatgccttatatcccgggtttcctgtcgtttcgcgaatacccggcgctgttggccgcctgggcgcagctgcggcaaaaaccggggctgatcttcgtcgatgggcacggcgtttcacatccgcggcgcctcggcgtcgccagccatttcggcctgctggtcgatgtgccgaccatcggcgtggccaagaagcgcctgtgcggcaaattcgcgccgctggacgccgccgtcggcgcgctggcgccgttggaagataagggagaacagctgggctgggtatggcgtagcaaggcgcgttgcaacccgctgttcatctctaccggtcaccgggtgggcgccgacagcgcgctggtgtgggtgcagcgctgcatggcgggctaccgtttgccggagccgacccgttgggccgacgccatcgcttcgcgccgtccggcgtttcagcggtggttgcagcagcatccggaggtgtcgccatgagcgatttcgggtacactgcgccgcagataacgcgtaagagagtaaagcatgctacgtaacccgattcatttacgtctggaacggctcgagggctggcaacatttgacctttatggccagtttgtgcgagcgtatgtacccgaattaccagatgttctgcaaacagaccgagttcggcgatccggcggtttatcgccgcattctggatttggtgtgggaaacgctggtggtgaaggatgccaaggtcaacttcgacagccagctcgagaagttggaagaggcgattccgtcggcggaagattacgatctttacggcgtttacccggcaattgatgcctgtatcgcattaggggaactgatccattcgcggctcggcggggagacgctggagcacgccatcgccatcagcgaaacatcgattcgcaccgtggcgatgttggaaatgacccaagccggtaaggaaatgaccgacgaagagttggaaagtttgccggcggtagaggaagaatgggacattcaatgggaaattttccgcctgttggacgcctgtgaagagcgcgatttagacctgatcaaggggctgcgatccgacctgcgagaggccggtgtcagcaacatcgggataaatttagcgcaataaggcaacaaaacgtgatttaacgcctgatttgtcatgccttaaggcttcacatccgcaccctgtctggtctacatttggggggcgtaaaaaaagtggctatcggtgcgtgtatgcaggagagtgctgtcaatcggcatatccgtcgcactcgatgctttgcaaacgataaacacactgtaaggataacttatgaacaagactcaactgattgatgtaatcgcggacaaggctgacctttccaaagcacaagctaaactggctctggaatccaccctggctgcaattactgagtctctgaaagaaggtgatgcagtacaattggttggcttcggtactttcaaagtaaaccatcgtagcgagcgcactggccgcaacccacagactggcaaagaaatcaaaatcgcagcagccaacgtgcctgcgttcgtttctggcaaagcactgaaagacgccgttaaataagaccgcgcctcggtgaaaagattaaacaggggggcgatggcgccccttttgtttactcgtcgggcgctcatggccgttggcatcgccgtcggcctgagcgcctgcagtttccattccgatatccccagctttaccgccagcggcttcgtggccgatcagggcgtgatacgtctgtggcgtaaagacgatgagcaacatcgtccgcaagtgttggtcagcgtttacagcccttaccgcggcccgggtaccattaccacgctgtacacctatcagggcgacgtgctgcgccaaatcaaacgtaacgacgccgacggcgatcgagattccattcagctgcgctttgccgacgatggcacggtgagctttatgcagcgccagctggcgacacgccgcgaaccgctgacccgcgatgaaatcgccctgtatcaatatcaggcgcgacggatcctcgaagtgagcaatgcgctgcgcgccggcaaggtcaaattgctgcaggggcgttggatgcagggcgaggtgcaaacctgcgacgggcagcgcttaaaacccgggttggatgcctccgccatcgcctggatcgaaaaacgcgcccgcagcagcagccggccggtgagcgtcgcctggctggaagcgcccgaaggcagcgagctgctgctggtggcgaacgacgatttctgcagctgggaaccgaaagaagaccagctataaaaaaggccccgcactgcggagcctctggtcattatcatgaaaggtcaaattatttgccgcgcgcaatcgcgcgataaccgatatctttgcggcagaagctgcctggccactgaatgccttccgccaactgataggcgcgttgctgcgcctgcgccacggtatcgcccagcgccgtcacgcacagcacgcggccgccgctggtgacgacgtcatcgccctgcaagcgtgtgccggcgtggaagaccttaccgtcggcgctttcctgctgcggtagcccctggataacctcgccgttgcgatagtcacccggataaccgccggctgccagcaccacgccaagggcagggcgttcgtcccaatcagagctcttctcgttcagacggccttcggcgcccgccagacacagttccaccagatcggagcgcaggcgcagcatgatcggctgagtttccggatcgccaaaacggcagttgaattcgatcaccttcggctggccgtcggcggagatcatcaggccggcgtacaggaagccgacgtaggtgttgccttccgccgccatgccgcgcaccgtcggccagatcacctgatccatggcgcgctggtggatttcgtcggtcacgaccggcgccggggagtaggcgcccataccgccggtgttcgggccggtatcgccgtcgccgacgcgtttgtggtcctggctggtggccatcggcaccacgttctcgccatcgaccatcacgatgaagctggcttcttcgccgtcgaggaactcttccaccacgatgcgatggccggcgtcgccgaaggcgttgccggccaacatgtcgcgcaccgcctcttccgcttcctgcagcgtcatcgcgacgatcacgcctttaccggccgccaggccatcggccttgatgacgatcggcgcgcctttgcggcgcacataggccagcgccggctccacctcggtgaagttttcatattcggcggtcgggatgcggtggcgcgccaggaaatctttggtgaaggctttggagccttcgagctgcgcggcggcctgtgatgggccgaagattttcagaccggcggcctggaaggcatcgaccacgccgatcaccagcggcgcttccggcccaacgatggtcagaccgatgtcatggctctgggcgaacgcgaccagggcggggatgtcggtggcggcgatcgccacgttttccagattggcttccagcgcggtgccggcattgcccggcgcaacatagactttatccgccagcggagactgggcggctttccaggccagcgcgtgttcgcgcccgccgttgccgataatcaaaatgttcatcagaagctccacgaatggcgtgcgccggagcgcacgcggcaaaaggaattaatggcggaagtgacgcatgtcggtgaagatcatcgcaatgccgtgttcgttggcggcggcgatcacttcgtcgtcgcggatcgaaccgcccggctggatcacgcaggtgatgccaaccgccgctgcggcgtcgatgccgtcgcggaacgggaagaaggcgtcggaggccatggcggagcctttcacttccagcccttcgtcgcccgctttgatgccggcgatcttggcggagtaaacgcggctcatctggccggcgcctatgccgatggtcatgttgtcacgcgcataaacgatggcgttggatttcacgaacttggccactttccaacagaacagcgcgtcacgcagttcctgttcggtcggctggcgctcggataccacgcgcagatcggcggcggttaccatgcccagatcgcgatcctgcaccagcaggccgccgttgacgcgcttgaagtccagccccgccacgcgttgctgccactggccgcaggccagcacgcgcacgttctgtttggcggccagcagggagcgcgcttcctgggtgacgtttggcgcgatgatcacttccacgaactggcggctgatgatcgcctgcgcggtggcggcgtccagctcgcggttaaaggcgatgatgccgccgaaggcggaggttggatcggtttggtaagcgcgctcgtaggcggccagaatgtcgtcgccgatcgccacgccgcaagggttggcgtgtttgacgatcacgcaggccggttcggcgaactctttcacgcattccagcgcggcgtcggtatcggcgatgttgttataggacagcgctttgccctgcagctgttcggcggtcgcgacagaagcttcctttacttcttcctctatatagaaggcggcctgctggtggctgttttcaccgtagcgcatatcctgcttcttgatgtagttgaggttcagggtgcgcgggaagcggccggacggctgttcggtctcgccgtggtacgccggcaccagcgcgccgaagtagttggcgatcatgctgtcgtaggcggcggtgtgttcaaaggccttgatggcgagatcgaagcgggtggcatagcgcagcgaaccgtcgttgttgtccatctcggtaatgatggcggcgtagtcgctgctcttcaccacgatggcgacgtctttatggttcttggcggcggagcgcaccatggtcgggccgccgatatcgatattctcgaccgcatcctccagcgagcaatccgggcgcgccacggtttgggcgaatgggtacagattgacgaccaccatgtcgataggcttgatgtcatgctgattcatgacagcgtcgtcctggccgcggcggccgagaatgccgccgtggactttcgggtgcagggtcttaactcgtccgtccatcatctccgggaagccggtgtagtcggaaacttcggtaacgggcagaccggcgtctgccagcagacgagcggtgccgccggtggacagcagttcaacgccgcgctgggaaagcgcttcggcgaattcaacgataccggttttgtcagacacgctgagcagggcccggcggattggacgaggttgttgcatggttttatcccttggctttgagtcgcaattaaagagcgttacgtgaatgtccacctcgttctctctataaagcgcagttttttgccttataaagggagggtcaggcacatattcaggtaacgcccccataaaaagggggatcgtttcgtcgcggggaattgtagcgaaaacgtttgcgtggcgctcgtaaattttccgtacaaatcgcatctgtggataacactgtgcgcaagtgggtataaggcggggttttgctgtggaatgcagcgaacgatcgtttttgctgaaaatacctgttgcggcctgcgaggaactccctataatgcgcctccatcgacacggaacatgtgaacaacttcacagagtatccgggggtcgcagagaaaaaatcctgaaaattagggttgactctgaaagaggaaagcgtaatatacgccacctcgagttagcaagcgaaagcgcctaactcactgctctttaacaatttatcagacaatctgtgtgggcactccacaagacgatatccagcatcttcggatgcaaaaaatatcaagtcttgaagagtgactaactgaagtaaaattcatgcagtaaatctttgagcatcgcttctcgagtggaagcaaatcaagcttttaattgaagagtttgatcatggctcagattgaacgctggcggcaggcttaacacatgcaagtcgagcggtagcacaggggagcttgctccctgggtgacgagcggcggacgggtgagtaatgtctgggaaactgcctgatggagggggataactactggaaacggtagctaataccgcataacgtcgcaagaccaaagagggggaccttcgggcctcttgccatcagatgtgcccagatgggattagctagtaggtggggtaatggctcacctaggcgacgatccctagctggtctgagaggatgaccagccacactggaactgagacacggtccagactcctacgggaggcagcagtggggaatattgcacaatgggcgcaagcctgatgcagccatgccgcgtgtgtgaagaaggccttcgggttgtaaagcactttcagcgaggaggaaggtggtgaacttaatacgttcatcaattgacgttactcgcagaagaagcaccggctaactccgtgccagcagccgcggtaatacggagggtgcaagcgttaatcggaattactgggcgtaaagcgcacgcaggcggtttgttaagtcagatgtgaaatccccgggctcaacctgggaactgcatttgaaactggcaagctagagtctcgtagaggggggtagaattccaggtgtagcggtgaaatgcgtagagatctggaggaataccggtggcgaaggcggccccctggacgaagactgacgctcaggtgcgaaagcgtggggagcaaacaggattagataccctggtagtccacgctgtaaacgatgtcgatttggaggttgtgcccttgaggcgtggcttccggagctaacgcgttaaatcgaccgcctggggagtacggccgcaaggttaaaactcaaatgaattgacgggggcccgcacaagcggtggagcatgtggtttaattcgatgcaacgcgaagaaccttacctactcttgacatccagagaactttccagagatggattggtgccttcgggaactctgagacaggtgctgcatggctgtcgtcagctcgtgttgtgaaatgttgggttaagtcccgcaacgagcgcaacccttatcctttgttgccagcggttcggccgggaactcaaaggagactgccagtgataaactggaggaaggtggggatgacgtcaagtcatcatggcccttacgagtagggctacacacgtgctacaatggcgtatacaaagagaagcgacctcgcgagagcaagcggacctcataaagtacgtcgtagtccggattggagtctgcaactcgactccatgaagtcggaatcgctagtaatcgtagatcagaatgctacggtgaatacattcccgggccttgtacacaccgcccgtcacaccatgggagtgggttgcaaaagaagtaggtagcttaaccttcgggagggcgcttaccactttgtgattcatgactggggtgaagtcgtaacaaggtaaccgtaggggaacctgcggttggatcacctccttacctaaagatattagttcgcgtggcgtgctcacacagattgtctgatagaaagtaacgagcagaaatacctttataggcttgtagctcaggtggttagagcgcacccctgataagggtgaggtcggtggttcaagtccactcaggcctaccacttctcatgaagtggaaaaggtactgcgcgtgactgtatggggctatagctcagctgggagagcgcctgccttgcacgcaggaggtcagcggttcgatcccgcttagctccaccatatagtccggtatttcaatacttcagagtatattggcgacagtatgctgcgaagtattttgctctttaacaatctggaacaagctgaaaattgaaacatgacggctgaaatttgtccctccgtagatgtattgggataaagagtaacctgtcatagagtctctcaaatgtttgcagcgcgaacgatggaaacatcttcgggttgtgaggttaagtgactaagcgtacacggtggatgcctaggcagtcagaggcgatgaagggcgtgctaatctgcgaaaagcgtcggtaaggtgatatgaaccgttataaccggcgatacccgaatggggaaacccagtgtgtttcgacacactatcatgtcatgaatacatagtggcatgaggcgaaccgggggaactgaaacatctaagtaccccgaggaaaagaaatcaaccgagattcccccagtagcggcgagcgaacggggaggagcccagaacctgaatcggcttgtgtgttagtggaagcgtctggaaagtcgcgcagtaaagggtgatagccccgtacactaaaatgcacaggtcgtgagttcgatgagtagggcgggacacgtgacatcctgtctgaatatggggggaccatcctccaaggctaaatactcctgactgaccgatagtgaaccagtaccgtgagggaaaggcgaaaagaaccccggcgaggggagtgaaatagaacctgaaaccgtgtacgtacaagcagtgggagcaccttcgtggtgtgactgcgtaccttttgtataatgggtcagcgacttatattttgtagcaaggttaaccgtataggggagccgtagggaaaccgagtcttaactgggcgattagttgcaaggtatagacccgaaacccggtgatctagccatgggcaggttgaaggttgggtaacactaactggaggaccgaaccgactaatgttgaaaaattagcggatgacttgtggctgggggtgaaaggccaatcaaaccgggagatagctggttctccccgaaagctatttaggtagcgcctcgtgaactcatcttcgggggtagagcactgtttcggctagggggccatcccggcttaccaaaccgatgcaaactccgaataccgaagaatgttatcacgggagacacacggcgggtgctaacgtccgtcgtgaagagggaaacaacccagaccgccagctaaggtcccaaagtcatggttaagtgggaaacgatgtgggaaggcatagacagccaggatgttggcttagaagcagccatcatttaaagaaagcgtaatagctcactggtcgagtcggcctgcgcggaagatgtaacggggctaaaccatgcaccgaagctgcggcagcgacgcttaggcgttgttgggtaggggagcgttctgtaagccgttgaaggtggcctgtgagggttgctggaggtatcagaagtgcgaatgctgacataagtaacgataaagcgggtgaaaagcccgctcgccggaagaccaagggttcctgtccaacgttaatcggggcagggtgagtcgacccctaaggcgaggctgaaaagcgtagtcgatgggaaacaggttaatattcctgtacttggtgttactgcgaaggggggacggagaaggctaggctggccgggcgacggttgtcccggtttaagcgtgtagggggtgtgacctggtaaatccggttgcatattaaccctgaggcgtgatgacgatgcactacggtgcagaagtagttgatgccctgcttccaggaaaatcctctaagctccaggtaacattaaatcgtaccccaaaccgacacaggtggtcaggtagagaataccaaggcgcttgagagaactcgggtgaaggaactaggcaaaatggtgccgtaacttcgggagaaggcacgctggcatgtaggtgaagtccctcgcggatggagctgaagccagtcgaagataccagctggctgcaactgtttaataaaaacacagcactgtgcaaacacgaaagtggacgtatacggtgtgacgcctgcccggtgctggaaggttaattgatggggtcagccgcaaggcgaagctcttgatcgaagccccagtaaacggcggccgtaactataacggtcctaaggtagcgaaattccttgtcgggtaagttccgacctgcacgaatggcgtaatgatggccaggctgtctccacccgagactcagtgaaattgaactcgctgtgaagatgcagtgtacccgcggcaagacggaaagaccccgtgaacctttactatagcttgacactgaacattgagccttgatgtgtaggataggtgggaggctttgaagcgtggacgccagtctgcgtggagccatccttgaaataccaccctttaatgtttgatgttctaactcggccccgtgatccggggtgaggacagtgtctggtgggtagtttgactggggcggtctcctcccaaagagtaacggaggagcacgaaggttagctaatcacggtcggacatcgtgaggttagtgcaaaggcataagctagcttgactgcgagagtgacggctcgagcaggtacgaaagtaggtcttagtgatccggtggttctgaatggaagggccatcgctcaacggataaaaggtactccggggataacaggctgataccgcccaagagttcatatcgacggcggtgtttggcacctcgatgtcggctcatcacatcctggggctgaagtaggtcccaagggtatggctgttcgccatttaaagtggtacgcgagctgggtttagaacgtcgtgagacagttcggtccctatctgccgtgggcgttggaagattgagaggggttgctcctagtacgagaggaccggagtgaacgcaccgctggtgttcgggttgtcatgccaatggcattgcccggtagctaagtgcggaaaagataagcgctgaaagcatctaagcgcgaaacttgcctcaagatgagtcttccctgggcctttaaggcccctgaaggaacgtttaagactaagacgttgataggctgggtgtgtaagtgcagcgatgcattgagctaaccagtactaatgatccgtgaggcttaaccttacaacaccgaaggtgttttggtgagaccaagacaatattcagcttgtttacagattggattgacaggcttcagcgatgaagcgggttgattaaaacgaatttgcctggcggcaatagcgcggtggtcccacctgaccccatgccgaactcagaagtgaaacgccgtagcgccgatggtagtgtggggtctccccatgcgagagtaggacactgccaggcatcaaataaagccgaaagccctgaacgtcagttcagggctttttgctatgtgcaatacgtaaaaaagcgcagctacgctgcgcggttttccccctcctccttattctccgccagcgagccagagaaaaggccccgaagggcctttgattagggtgtgtttgcttttttcacttattattcgatcaatgcgagctgccctgagagatgcccagcccggtttgcgaacggacaaactgggcccggaagcgttcccgctcctgctgcccggccagcgagctgtcggtgatcgagaacagccaggtgccgacaaaggccacgatcatcgagaatagcgccgggtattcatacggataaatcggtttctcatggccgaggatctgcacccagattgtcgggccgaggatcatcagaatcaccgccgttaacagacccagccagccgccaatcatcgcgccgcgagtcgtcaaacgcgaccagtacatcgacaggataatgatagggaagttacagctggcagcgatggagaacgccagcccgaccataaaggcgatattctgcttctcgaacaaaatccctagggcaatggcgaccagccccaataccacgacggtgatcttggagaccttcagctcatcgcgctcggtcgccttgccatttttaatcacgctggcgtacaggtcatgggacacggccgaggcgccggccagcgtcaggcctgcaaccactgccagaatggtggcgaacgccaccgccgagataaagccgaggaagaagttgccgccaacggcattggccaggtgcaccgccgccatgttggtgccgcccagcagcgcgccggtggcgtctttgaacgccggattggcgctgaccagcaagatggcgccgaagccgatgataaaggtcaggatatagaagtaaccgataaagccggtggcgtagaacacgctcttgcgcgcttccttggcgtcactcacggtgaagaaacgcatcaggatgtgcggcaggccggcggtgccgaacatcagcgccaggccaagcgacagcgcggaaatcggatcggacaccagcccgccggggttcatgatggcgatgcctttcggatgcaccttcaccgcttcggcgaacagggtattgaagtcgaagttgaccgacttcatcaccatcagcgccataaagctggcgccggccagcagcagcaccgctttgatgatctgcacccaggtggtggccagcatgccgccgaacagcacgtacagcaccatcagaatgccgaccaggatcaccgccacgtggtagttgagcccgaacagcagctggatcagtttaccggcgccgaccatctgcgcgatcagatatagcgccaccactaccaacgagccgcaggccgagagggtgcggatcggtttctgctgcagacggtaagaggcgacatcggcgaaggtatagcggccgagattgcgcaggcgttccgcgatcaggaacagaatgatcggccagccgatgaggaagccgatggagtagatcagcccgtcatagcccgaggtgtagaccaatgcggagatgccgaggaacgaggcggcggacatgaagtcaccggcgatcgccaggccgttttgcaggccggtaatgcgcccgcccgcggtgtagtagtcctgacgggaacgggtgcgtttggacgcccaataggtgatgtagagcgtggcaccgacaaacaggataaacatcacgatcgcctggatgttcagcggttgacgatgcacctcgccgccaatggcgtcggcgcaggccaggcccggcagtaatagcagcgcggcggcggacaataagcgcttcattgtttcacctcgcgcaggatctctgcggtgaggcgatcgaactcgccgttggcgcgaaacacgtagatcccggtcaagacgaaagagatcacgatcaacccgacgccgaccgggatcccgcgggtgatggtcgatccggcggcgatcggcgtaccgagccattgtggatcgaaggcgatcaacaaaataaagccgacgtacagcgccagcgtaatcagcgaaagcagccaggcgaaccggccgcgttttctcaccagctctttaaagcgcgggttttcttcaatcccttgataaatggtgtcattcatcagagtgtctccagtcggtattgagagagtacgccgcgccagggccgctcaacggcgcgttatccgaatgagcggcctgaagcggcgtaaattatgacggcactttcattgattgtttttcttccaacagcttgtcgactacggccggatccgccagcgtggaggtatcccccaggttgctggtgtcgccggcggcaattttgcgcaggatgcgccgcatgatcttgccggagcgcgttttgggcagtgagtctgtccagtgcagcacatccggtgtagcgatcggccctatctctttgcgcacccagttgcgcacttcggtatagagctccggcgtcggttcttcgccgtggttcagcgtgatgtaggcgtagatcgcctggcctttgatgttgtgaggaatgccgaccaccgccgcttcggcgattttcgggtgcgataccagcgcggactcgatctcggcggtgcccagacggtggccggagacgttcagcacgtcgtcgacgcggccggtgatccagtagtaaccgtcctcgtcgcggcgggcgccgtcaccgctgaagtacatgcctttgaaggtcgagaagtaagtttgctcgaagcgatcatggtcaccgaacagggtgcgcgcctgacccggccaggaatcgacgatcaccaggttgccttcgcaggcgccttcctgcggcgtgccgacgttatcgaccagcgccggctgtacgccaaagaacggccgcgtggcggaaccggctttcagctcagtggcgcccggcagcggggtaatcatgaagccgccggtttcggtttgccaccaggtgtcgacgatcgggcatctcgcgttgccgatcttgttgtaataccactcccaggcttccgggttgatcggttcgccgaccgagcccatgatgcgcagcgaatcgcgtcgggtgccttcgatcgccttgtcgccttcggccatcaacgcgcgaatggcggttggcgcggtatacagaatgttgacctggtgtttgtcgatcacctgcgacaggcgattgacgcccggatagttaggcacgccttcgaacatcagcgtggtggcaccgcaggccagcgggccgtacagcagatagctgtggccggtgacccagcccacgtcggcggtgcaccagtaaatgtcgccgtcgtggtagtcgaacacatacttaaaggtcatcgcagcgtagaccaggtagccgccggtggtgtgtagcacgcctttcggcttgccggtcgaaccggaggtgtacaggatgaacagcggatcttcggcgttcacttcttccggcgggcagtctgcggagacgccctgggtcagctcatgccaccacagatcgcgcccttcctgccagtagcccggtttaccggtgcgtttgaataccaccacgttggccacgctgaccacgccgggatttttcagcgcatcgtcgacgttctttttcagcggcacggcgcggccggcgcgcaggccttcatcggcggtgatcaccagtttggcgttggagtcgataatgcgcccggcgacggcttccggcgagaagccgccgaagatcaccgaatgtacggcgccgatgcgcgcgcaggccagcatggcgaccgccgcttccggcaccatcggcatatagatggccaccacgtcgccttttttaacgccgagctgtttcagcacgttggcgaattggcagacatcgtggtgcagctgtttgtaagtcacctttttggattgggtcgggtcatcgccttcccagataatggcggtttggtcaccgcgctcggccagatggcggtccaggcagttggccgccaggttcaacgtgccgtcttcaaaccagcgaatgctgacgtggcccggatcgaacgaggtatttttaactttggtatagggtttgatccaatccaggattttgccatgctcaccccagaaagcctctgggtcttgaaccgactgttgataatactgttggtattgtgccggattaatcagggcgcgttctgcaattgcagaaggaatagcgtgtttatgcagttggctcatagcttttctccttgaagttgttaatgatatgtcaactgaaggttaagtatagtttgctacgattctttgtttcttttttgcgcggcagatcacgcaacaaagatattgatttgtaatcgttctgtcgcatttgcagggcgtatctatctctttggcgcttaaatcctcataaacccacgtttttaaccaaaaacacttatataaagaacaaaaaagaataaaccaaaacggactcaactgccgcgaaattaatagatacgatcagggccgccattatttctcgctataaatctttttgggttgtttttcgctattaatattctaagttggcattagcacgatataacgatggactgcaccgcgtgaaataacgttttattaacgcttaattcctgatgaaaactcgggaaataccctgtggcattcatcctgcggtatcgttcgatttttaatcgaaatataaagtggcgctgcatttatggacgaaagtgtcactcggccaattctcatttgtttgacttttgagtaacaaaatataaacatacgatgcggattaaatatgcagaatgagcgaaaaataacgcattttaatcgcgttcaaaaaaccgtcgtcggcgcggttatgtacttcattatatgaaaaattatgtttttaataacaagcaattatgccatttgaaatagttacgcgaaatttttgtgattcgattcagcgctcaagcctgacaaatcaaggcttgcagagcatgccgcccggatgatacagatttatactgcgtcgcacccagggcaggtgaacgcttccactgaattaacataagcctgtaataaatgattaagtattcttttcgccgtgttgcgactttgtacggcgcaaagagtctttgaggactttttgggtatgaaaagtgtaaaaattagcctggcttggcaaatcctgatcgcgttggtactgggtattattgttggcgcggtattgcacaaccagaccgaatctcgtgagtggctggtgagcaatattctcagcccggcgggtgatatctttattcgtctgatcaagatgattgtggtgccgatcgttatttccacgctgatcgtcggtattgccggcgtgggggatgcgaaaaagctgggccgcatcggattgaaaaccattatctacttcgaagtgatcaccaccgtcgccatcgtggtggggctcaccttggccaacgtcttccaacccggccacggcatcgatatgtcgacgctgaccacggtggacatttcgcagtacgagaaaaccaccgaacaggtgcaaagcggttcgcacagtctggtggcgaccattctgtcgctgatcccgtcgaacgtcttctcgtcgatggccaagggtgacatgttgccgattatcttcttctcggtgctgttcggtctggggctgtcgtcgttgccgaaagagaccaaagagccgctgctgaaggtgttcaaggcggtgtccgagagcatgttcaaagtcacccacatgatcatgcgctatgcgccgatcggggtgtttggcctgattgcggtcacggtagccaacttcggtttcgcttcgctgctgccgctggccaagctggtggtgctggtgtacttcgccattgcgttcttcgccctggtggtgctgggggcggtcgcccggctgtgcaacctgcgcatctggacgttgatccgtatcctgaaagacgaactgatcctggcttattccaccgccagttcggaaacggtgctgccgcgcatcatcgaaaagatggaggcttatggcgcgcccaagtcgatcaccagcttcgtggtgccgaccggttactcctttaacctggatggctcgacgctgtaccagagcatcgccgccatctttattgcccagttgtacggcatcgagctgtcgttggggcaggagatcgtgctggtgctgacgctgatggtgacctcgaaagggatcgccggcgtgccgggcgtctcgttcgtggtgctgctggccaccctgggcagcgtcggcattccgttggaaggcctggcgttcatcgccggcgtggaccgtatcctggatatggcgcgcactgcgctgaatgtggtgggtaacgcgctggcggtattggtgatcgccaaatgggagcaccagtttgatcgcaagaaggcgctggcctacgaaacggagttcctggcgcagaaggtgaagccggccaaccaggcctaattaccgagtatcgccgacgttgaaaacgccccaggcagttgtgccggggcgttttgtttttatggctcttcaaccggccactttcttttctctgtcctactgcgcgacttgcatccccgcttaacagaatctaaagtgttaccaaattaatagaaatgataatagatgttattatcattttcatttgatgatgtatggagacacgcaaagccgttgaacggtggggttacgcccgttcggcgtctttattcaggcttatcaaaggtaggtaacatgtcggacaccgctttggcctctgaatggttgccgctggcgccagcgcagcttgatttctgggaagaacacaccttgcaccctgggcagactctgtccaccgtcgcacattgcaccgaactgtgtggcgcggtagaggaagaggcgctctgccgggcgatcgccaccactctcgccgagacgcaggcgtttgccttgcgctttggtgagcggcatggcgacgctcccccgccgttacgttacgatccacagtgcacaccgccattgcaacgcatcgatctgcaaacgcacggcgatccctggcaggcggcgcaaagcctgatgcgcgaagatatcgcgcagcgccgggcgctacatagcgagccgctagccgcagcctggctgctcaaattggggccggagcgctacctctggtacgtgcgtgcgcaccatattctgattgatggcttcggtatggccctgatcgaacaccgctgcgccgcgttatatgcgcactatctgggtgagggtagcgcgggtatgcccctgggtgcctttaatgtctttcaacaggccgagctggcctacgctgattctgagcgatgcgagcgcgatcggcgcttttggcagagctatctgccgccgtcgcaggcgttgccgacggtgcgcaagggcggcagggagtatggcgtgcgacgtctgagcgtcaaccgtcggttgtcgacagaagtcgcgcaacgtctggcgcagcagtcggaacgcagcggcatcaattggcccgacttgctggtggcgctgtcggcggcctggctgtttcaggtgatgccgcgcggtacccggcagggcgatacgctgccgatgtggatgccggcgctgaatcgccgtgggcaggccgccaccaacgtgccttcgctggcggtcaataccctgccgctgctggtgtcaccgccgcaagcggagacgctggggagctttctcaccacgctgacgcagcagctgcgggagctgcgcagccacgccggctaccgcctgcgccaactggccgccgatcgcggcgtggatccggactcgcgcttctttatttcccctttcatcaacgtgcaacccttcgatacgccccgttttaccggctgcagcggtacgcgcagcgtattggccggcggctcgggcgacggtttcaacctgacttatcgcggccgcaccgacgcccgcgatctgcaggtggatatcgatatctatctggagcagtttccgacggaggatgcgctggactatggcgaggcgctgcaagaatttctgttgcgtgcgctgcagcgggaagcctgggagcaaccgctggcggccctgacggcgttgcccgcctgagaaagtgcgggcgggagggtgctcccgcccgagtggcaggacttcagctggccagcaacgccgccacttcgcgcgcgttcttgcacggcaagagcgaactgcttaccagacgggtgccgaaagcgtcattgaggcgcgacgccacctgtttgatatgcggcagcttcagccccatggcgataaacgccgtctcttccccccattccgggcgtggggtcacgccgatcgcctgccagtaaatggtcaggatctctgcgctgcgcgccagcggcgcgttcggcggcggggccgcgcaggcgttcaacgccggcgcggtttgctggtggctcaggtcggcgcggatgcgatggcgatcggttttaccgttggcggacagcggcagcgcctcggcatggataaagcgcgtgggaatatgggtacagggcagatagccggtggcgaaggcgcggatctcggacagcggcagcggtttgccgtcgcgggtcagatacagggcgccgagcgccgcttcgttgttctctccgctgggataatccaccaccaccatatccaggatcgccggatggcggcgcagcacgtcttcgatttccggcagcgagacgcgcacgccgcggatcttcacatagccgttcacccgggtggcgaacatgatgttgccgtccgcacggtagtagccctgatcgccagtgcggaaagcgcgcagcggttgtccgtccggcccttcgagggtgatgaaatcgtgctgcttcagctccccctgctccaggtagcccaacgccaggttcaccccggcggtatggatgcggccgaccacgccggccgggcagtggctgccgtcgtcatggcagatgaaataacggttggcgggcagcgggcggccgtaaggcacggtgccgctctcctgcggggtgataggatgccagatgctccagatggtggtttcggtcggcccgccgagcgagaacagcgcgagatccgggcgcagggttcgcagggtttgcaccgtcgccggcttgatgtagtcgccgccttgcgccaccaggcgcagcgaacgcaggctgtcggccgttttgcaggtgagcagcatctccagaatggccggcaccgaacaccacaggctgacccgatgtttttccaccagctggttccagctgatggcgtctttttcctgatgcggcgccggcagcaccagcgtagcgccggcgcacagcgaaccgaacagatcgaacatcgacatgtcatggtgcggcggcgtgacggaaatgaacacgtcgtcggcggtgaccgcccagcgctgctgggtctggtggataacgttggcggtggcgcggttgttgagcaccacgcatttgggcttgccggtggtgccggaggtatacaggtagtagcttgcggccaggctggcgctgcgttccaccaacgtctgttcatccggcagcgcaggcgcgcgatccgtcggcgccagcaggatcgccggcgtcacgccgatcggcgtctccagatcgccgccgtgcaccaccagcgttggccggcagttctccagcaggtaggcggtgcgttccggcggtgagttgatatcgataggcacccagatcaccccctgcagggcgcaggcgaggctgaagatgatctgttctgggctgcgcggcagatacagcgccaccacgttgcccggctgcacgccgcggctttgcaggttggcgatcgccgtggcgatctgctggcccagttcgcggtaggtcagcgtctgttcgccgcagatcagcgcgttaccgccgttttgtgcgccaaacagccgctcggccagctgcgccagataaggataaggcgcgtaattcgcttcgctgtcgttgtggcggtaatgcgccagatcgatgaaatctcgcggcgcgatcgccaggtcggcgcgttggcaactgcgcaggatgcgtcgctgcaacgccgccagcatggcttctacctgctcgccgtgcagcgcctgttcggcgtagtccacgcacagctgcaggtttttttcgctgtccagcgtcaggcgaatatcgatggcgacctgcggcgtttgggtcaggccgtcgtgaaagcgcaccggcgcctcggccggcagcgtttcccaacccagacagttggtcaggatcaccggcagcgccgggccgccctggctttggccgagcaactgccgcgccagatcgacgccggaaaacgccaggtgatcgagcgcgccgagcacatcgtcctgcaaggcttgcgcgcgctggataaagtcttcgccatagcgcgaatagcgcaccgccacgaagctggaggcgttgcccagcgcgccgtcggcggcggggaacgccaccggcaccccgacgcacagctccccgtcggtggtccagtgggccagcgtatcgaggatcagtgccgagagcaggctgttgcgcagcagcgcatgcggcgatcccaggcggccaagctgttttaccgtatcgcgcggtagcgtcaaggtggcgcggcgatagcgtgatgaggtgagattggcgagcggggcgcgccacggcagtgccgacggggtggtgacatcctgcagcttttcacgccagtaggcggcatcggcctggcgctgcgccgccgatgcggcggggggcggcagtgtggcggcggtcgaggtcagagggcgatcgtcgaacaggcgcgcgatcacggtggagatcccctggccgtcgaggatcaaggcatcaaagctggtaaagatcagcatatcgtacggcgatcccgtcggatcctgctgttcggcaagttggatcacggcgatgcgccacagcggttggctcggatcgtggcgctggtgggagtagcgctcgcgcagctgttcgacctggcgctgcgccgtttcgccacccagggagcgaagatcgtggcgatccagatgcagcgtggtttccgggcgtacgtgctgcgtgccgcgctgcacatcgatgcaggtgcgaagcgccgggtagtgctgtaccagctcggtcaggcgcgcttcaaggcgcggtacatcctgctgccgggcgcggtattcgcgaaagtcgtgcatcgctacgccgccgagcggccatcgatcgctgcggcccagaaggtaggcctgctgcagtgcggttaatggtgtctccatggtacttccctatagtcgctaaccgattaaaacgagccgggcaccgtgcgcccggaaaccgatctcagtgctgcggcgccagggcggcgagcagcgtttttgcatttcgccccgcctcgggcgaccgttggcagatcaacgccgccagcgcagccggggagggatgcgccgtcagatcctgcgccgtcagcgccgccgccagatacttgttgagcaccgtcagcagcgcgttcaccccggcatccggcaaggccaaccggcggatatcgtcgtggtcgcgcacattggcctcgggagccacccgcgccagcagccggtgcagcacttggcgcaccggcgcctgctgcgccagcgcgtcgggcgtgcattgcgccagcagctgcgacagcgggcgatcgaacgcccccgcttgccgcgcggccaggtgcagcagcgcccggtaacaggccagcaggcgcggcagcacgtgctcggggaacgcgtccagccgcacgtcccagttgatcagaatgccgtcgtcgacgtgggcgacctgcgcatccagcgccacctgcggcccctgagagatcacccaaccgagacggccaaaggtgttggtgacccgttcggaaaacagcgttttgccgcggatgccgaaaccggcggtaaacaccaccggcgaaggctgcaggctgccgtgcaggcgcgacagatcgcgcatcacgctgacgccggggtaatccgcatgctcgatcagctccgccagctgcgtcatcaggcgccggcagaaggcgttcaggttttccgtcgggttcagttccacgccgagcagcaccaggttagagaaatcgccgatgaggcgatgtgcgtcctcccgttcgctctcgcggtggaacagcggcacgttgagccgaaagcgcgtcatgttccacccctggccgacggccagcgcgaacagcgccagaaacagcgtcgagagggaggtgtggtgccgcttggccacactctccagcgcgcggctttcttctgcattcagctgtatggccaaacgatcgctgcggcagcggtccggcgtgcgcaacaggcgcggcgccggcggcacctgcgccaggcgagcacgccaccaacgctggccgcgttcgcgccgctgacgcagcgcctcgtcggcgtcgcgtcgttctaggtgatcgaagtaggccggcggcgcgtcatgggagggcgccgccggacactggtgataaaacgccgccagatcctccatcagcaggcgaaagctcatggcatcgccggcgatcatgtcgagatcgacgtgcaagcggctgcgcccttccggcagcaggctcaggctgatgtcgcagggaacgccctgttccagcggcagcagctgggtgcttttcgcctggcgtttggcggcgagcgcggctgtcagcgttgcttcatcggtgtgtcgccagtcgtcgagatgcaaagtatgccgggagccgggaggtgcgatcgtctgcctgccatcgtcggtaatgcgcaggcgtaacagcggatgacgcaggtacaacgcctcgacggcctggcgcagccgggcgatgttcagctcgccgccgtcgaattccgcataaagatgggcggccatgccgcccagagggggagcggactgtcggccaacccaataggcggcctgcatcgtggtcaaagctttcatcgggtatccattttgattcagccaacgagactgcaagaatatatccaaatgttaataggaatgaaaattattattatttgatccatttgacgcgagggtgctatctataaggggttttagctgtaacgggcaggcatggggttgggtgtgaataatttattcatattattcttagcattgtaattattgtctgttattgcagcgcttgttttacctgcgaaagtataaggttttctggcggttatcgtggccgctctcacacctttattgataatgatttgcattagaaaatgcaaaatattatcattcttaacattattttacgtttttatacaagccgtcggccgctccgccggcggcttggccgtggacgggccgcgcccgttcggccgcgaaagacatgggtttgccgcagggataagcaacagcaaggccgggaaggccgcagcgtcatggtctgtgtgagtgtcgatgtaggttgtgtaaaaaaaatcaaattttgtgcacctctgggatgaaaggagaagacatctatgggcaagcattttgcggctcaacggcatgaaagcgtaggaaacggggaaaaggcggggttaagagccattggggcgttttcctcggtatttttaggcgtgtgttcactggcgatcggtaacgtcaacgcggcggaaacgaagagcaacgaaacctaccaggacgcggaaacgctgctggtcaccggtgagaagatcaaacgttccattttcgacaccggctccagcgtgcaggtgttcgacagcaaccgcatcgcctcgatgcccgacgcggtgcagatccccgatctgctgcgcatgacccccaacgtggtggatctgggcatcggcaacgaactgccgaccgtgcgcggtatcgacggttccggcccgaacgtcggggccaatgctttcctcagcggcacccgcccgcgcctcaatctgtcgttggacggccgttcgctgacctataacgaacaggcgttcggcccgcagtcgctgtgggatctggatcgcgtcgaagtgttcctcggcccgcaaagctacatccaggggcgcaacgccatcgccggcgccatcgtcatggccagtaaagacccgaccttcgaatgggaaagcgccttcaagggtggagccggcaaccagcactcgtcacagttggccgccatggcgtctggcccgctggtggaggatcagctggcgttccgcgtcagcgtcgatcgccagcgccgccgcagcgaggctgacctgccggcctatgcgccagtgggcgatccgcgtgaagtggaagccaccaccgcccgcgccaagctgttgttcaatccggccggcctgcgcgatctgaccactaagctgacctttaaccacttcggcagcaccgcaccgcaaaacgaaagcctcaacccgcagccgcatccgaccaatccgcgtcacgatccgcgccgcgccgtgttcaaaagcaacatgaacagcactatctgggatctggcctgggaggcctccgatgcgctgacgtttgaaaaccgcgttatctacaccgatttcaacatcaaccgtcctaccgcttacaacatccaatacgccgagatcgacggccaggaagttcacgtggagccggtggtgcgcttcggtggcgcggacagccgcctgcacgggctggcggggctgcgttacttccacggcacgcaggatgagttcgtcaacattttcggcggctcgaccttcaaggataaaaccgatacccattcggcgttcgccgagctgacctatgcgctgacgccgcaggtggacgtgaccgccgccagccgtctggaacgcgaacaccgtcgccgcgacggcggcagccaggcggtgcgcatcgattttgatgaaacctacaccgtgttcctgccgaagctggacgtggcctggaaaccgacggatacccaaacctacggcgccaagatcgcacgcggctataacgccggcggtggcggcatcacgatcggcacgccggtggtcagctatacctacggttccgagtatgtctggaactacgagctgtacacccgtcatcacctgaaagacgccaacgtggtgctgacgggtaacatcttctacaacgattacaaagacatgcagctgccgtactcgctgggtgagaactccagcgtgatccgcaacgccgacaaggtggaaacctacggggcggaaatcggcgccacctggcagccgcgctgggacttcgagctgttcggcaacctcggcctgctgaaaaccgacatcaaaaagttctcgggcagcggcgtggaagggcatgagctggcgcgcgcgccggcttacaccgccaacatgggggccaagtatcagttcctgaaagggtgggagctgagcagcaacgtggcgttcaccgactcctactattcgcaatacgacaacgactcgcgcgggcgcatcggctcctattggacggccaacgcccagctggcttacaccttcgactacggccgcgccacgctgtatgcgaagaacctgtttgactccgaccgccgcgagatgatccgaagcaatgacatctacacggcgacgctccagcgcggccgcctgatcggcgcggcggttgagctgactttctaacgctatcgcggtgacgggggacgcatgtcccccgttttgtgcgctatcccggcacggccgggcaaaggagataacgcagtgatcggtgattttgacagcattctgagcgatgaagaggcccagcggctggagagcgcgtttcaggcgctgggcgcggcgtcggccaacggcgagcggtcggtaagcgaagccgaagagcgggcatggttcgcccatctgcagcagggtgacgcacgcgggcagcgggcgctggcctggcgcctgacgggggaagtggatatcgcccggctggcggcggcgctgcaggcgctggggcgggagacgccgggcgtggacgtgcgctacgtttttgatgacgaaaacgggctgattaaacgcgccgccggttcggcgccgttaccggtgagccttcgtcaggtggcggacgaacagcacgccattggctgcctgctgcaggcgcaggcggcaccgtttgaactggaaaacgaagcgccgctgcgcggcttgctgttgctcacgccgggcgatgccgtgattttgggcgtggtcttgcatgacatcctggcggaaacgctgccttggcgccacctgccggcgatgctgtccgcccgttacaacggggatgtgatgcctctgcctttcgcggcggagccggtcgagctggcggaaaccacggagccgcaactgccctgggcgcgccaggcggtctcgctgcaggattaccgcagcccggcgccgcgtgctgaagcgttgccgccggtgggcgcgcgcgtggtcacgcgcattgatcgctcgctgttgcccgccaacgacacgccgcgggccttgctggcggcggtggcggcgcggtttgccgagttcgtcgccgcgcaggccggcggccaagcggtgcagctgtgcgtgccggccgcggaaacggcggagttcgtcggcctggagcttggcctgacggcgccgccgctgatgcgcctgaccgtgcagcatggcgagagcgacgtcgggcagcggctgctggtgcaggccgtggctgaacagccggacccgcaacgggcgcagctgctggtggcctggcgcgacgatctggccgcagagtggcggctggaaggcgttcacgccgagcgcatgttgctgccgccgctgcatacgccgtttgaactggcgctgctgttgggcttgccagaggcggaagcgctgacgctcgagctggtcaccgatccgcgcctgtctccccatgtggcgcctttcctgctggagcagttcagcgcgttcctggccgggcagcggattgccgtcgccttgccggcggctgaggccgcttccccggcgatggccgcgccggcgacgaacggcgaggcggacgaaagcgttgcaccgctgattttgcaggagttccgtgaggcgctggtggcgccggaaatgaccctggatgaagacttcttcgatcgcggcggccattcgctggtcgccacccgggtgatcggccgcttgttgagcctgcatcagatcgaaatcaacattaacgatctgttcagccatccgacggcgcgtgggctggcgggctacgccaaacgtctgaacgtcgcgcagccgaatgccccggtggccgccgccgacgatcatgatcgcgcgcaggcgccgctgtcgctggcgcaggaatcgctgtggaaggtgtatgaagccttcggccatgacgagattttcaacctgccgttctctctgcgcttcttcgatgcggtggatgaaacggcgctgcatcaggcgtttatcgacgtcatgactcgccataccgtgctgcgttcacgctttgttgagcagctgggcgaggtggtgcaggtggtggtgccggccgccgaactgccggattactcatggttccgcttctctcacgagacgccggcgggcaacgccgccgccctgttggccgacgccggccagcaccggttcgatctggccgccgagctgccgctgcgcgtcacgctgctgcgcgatgcggacaacggccagcagctgctgtcgctgctgttccaccatgtggtgctggatgaatggtcgctcaacctgatgatggatgagctgggcatcgcctaccgccatcgcgtcgtcggccaggcgccgcagtggagcgggcaaccgccgcagttccacaccttcgcccggcagcagcgggcctccggggtgcagcagcaacatctggactactggctcgatgcgctgcgcggcgcgccggtcggccagccgatcttccggcaagaaccctctacccacccggcagtgccggcgccggcggacgtcaacggcggctggctggagttcgaggtcgatcccgctgtggcggaaggcctgtatcagctcgctcgccgcaataacgcttcgctgttcaacgtggtgtatgccgggatcacctcggcgctgcgcctgcttggcggcccggcggatctgctggtgggcacttcgacctccggccgtaacgacgccgagttcttcgataccgtcggctacttcaccaccgtggtggtgcaccgcgtgcgcttcgacgaagggttgacggtggccggcttggtcagccaggtgaaaaacaccatcaacggctcgctgccatacaccgacattccgatcgatctggtggaagaagggctgttcggcgtggacgccgaccgcaagaaccacatgtttgaagtgttcatccagatccacagccgcatcaaactgaacggcgagttccggctgcaggacggcagcgcgatcgcctaccgtcaggtggagccggagaaagccgaatcgttgctcggcctgcagtttgaggtgatggaagacgatctggggggggcgaaatccctgcgggtgatgatgacctaccgccaggatcactacagccgggagcaggccaatctgatcgccgacggcgttcagcacgtctttacccagtttgcgcagcacatcgctggcgatatcgctctggcggcgctgccgcccgggccgcaggcatgacgttgtttcactctaaccgaaagcatgattttcaaggagataaaaggatgtctggaaccctagcaaccccgcgcgcgttactgtcgctgctggtggcggcctctctggtggtcgccggcgccgcgcaggccgacgatgccggcatcaaaccgcaggacatcaagcgccaggcgctgtcgtcgacggtggtggagatggcctacagcacctcgcaacaggcgctgttcgtcagcgcgccggactggaaggaagaggcgcgctcccgcgtgctgcggctggatcccaacaccctggcgatcaaggcggagatcccgttgcaggtgaaaggcttcggcgtggcgctgaacgacgcgggcaatcgcctgtacctgacgcaggccttcaacggcgaagtcggggtagtggacaccaccaccaaccacgcgctgggcagcatcaagttgctggacaaagcggtgctggagcaggcttacaagcaggcgggcatcagcggcaagcgtctggatttcctgttggcggagctgaagaagtttaaaatcaccgaggactacctgtaccgcctccgcgagctcaagtatgacgcgcaaagcggccgtctgttcctgccgggtctgggcttcggcgtcgacagcgtgctgtatgtggtcgataccaaggccggcaagctggagaaagtgatcccgggcttcggctacaacgcggtgggcatcacgctggatgagaagggccgccgggtgttcgtctccaacatgcaggggcaggtgatcaccctgaacgccgacacgctggcgatcaccgccacgcacgaagtacaggccgatcagctgctgaacctggtgtatgacccggcgagcaatcgcctgctgggcgtcgatcagggcatcgatcgcgacgactaccgcaatcatcatctggggcacgactatgtgaagcgcagtagcggccaccgggtattcgcgctggatgcggacagcggaaaagtgctggccagcgagctgacggatgaggtgccgatcggcctgttgctcgatgagcgcagccagcggctgtatgtcgccaaccgcaaaggcgtgcgcgtggatcacggcgccggcacgctgacggtgttcgacgccaagaccctcaagcgcctgcaaaccgtagacctgccgccgcaccctaacagcctggcgctggatccgaaaggcgacgcgctgttcgtgacggtgaaaaacgacggcgctgccaccaaggccggcaagccggaaagcgtggtgcgcattcagctgcacaccaggtaactgaattgcaaaggtaaaaaaaggggcgccgcggcgcccctttttcgttgggtcatgtcatcagaagtgggtgttgatgctcatgtagtaggtacggcccgattcgttataggtggctgcgcctgcgccatacatgtaggagttggttttcgcgttaccgacagtttgtgcattaccggcgcggaattggcgtttgtcgaacaggttgtcgatgccggcggtgaggctgacgtttttggtcaggtcataggtcgcgctggcgccgacgacggcgtaagggctgacctcgcgggcttctgagccgacagcgctctctcctttatagttatacttcttcggtttctggcggccgtaccaggtcagggtggactgcatcgacagatcctgcgtggcctgccagctgagggtcgagttgacggtgaacttcgggatcaccgacaggtaatcgccggtggtcttgttcttgttctcgatcatgtaggtggcgttgttgctccaggtgacggtctcgctgaccggcacgttcaacgagccttccagcccctgcaccaccgccttcggcacgttttcccactgatagatatcggttttaagactgtttgaggaaattggcgcatagccagcctcaattttgttgcggtaatcgttgcggaagtaggtcacgccggccagccagccgtcgttatggaactccagcccgatctctttgttaacgctggtttccgctttcaaatcgtcgttgcccatcagatagcaagcgccagcactggctgcacaaccttgaccacggctatacaggatatagttaccgttgttctggaacagattgggcgctttgtaggagcgtgcgatccccattttcaacgtgaagtaatcacccagttcctgcgacagattcagcgccgggctccagttgttgccggattcggagtgcagatcgtagcgcaggcccggcgtcagcatggtggtgtcggtcagctcgatattgtcttcggcgaacagcgagaagatatgtgcggaggaataaggactacggttagagctgtccactccagggatcgctccaccttcggtgagagactggctggtggaggtgccgtctttcatccgttgctgagaccactcggtacccagcgtggcggtttgcgcgacgcccagctcaaacggcacgctgacttcgctgtgcgccaggaagtcgtccagcttgattgtgccgaaaccggtgttattggtgtcgaagatgccttcggtgccaccggccaacccttcgttcaggcgggtgttgcgggtgcgctcaaactgcacgtagttgttggtgctcacgccgttgtcccaggcgccgcggtgggtcaggccgaaggtttcacggtagatgcggttggtctctttgccgtaattgctctgcaccagggggttggtgttggtgttctgggtatcgccggcgtacaggttgccctggcggccataggcgtactcgaactccaatgactgcagatgggcgaaatcccagtgcagcagagcgtcgatgtttttatcgaccaccccttcacgtccggcaggtaaggtattggaatagctgccggtgcgctcggattgatggccttggttaatatcccaggcatcggcctgcgttttgctgtagccgccgaacaggcggaagctcagggaatcgctcagcgggccggacaggctgaaatcggtgcgcttggtggcgccttcctgcttgtgctgcggcacgttgaagtagccgttcagcgagccgtgcagcgcatcgccggctttcttggtgatgatgttgaccacgccgcccgcggcgccgttgccgtagcgtgcagcagcggggccgcgcagcacttcgatgcgttcgatcatttccggcggcacccaggcggtatcgccgcgggagtcgcgttcgccgcgccaaccctgacgcaccgagttgcggctggaggccggtttgccgtcgatcagaatcagggtgttttccgggcccatgccgcggatatcgatctggcgattgttgccgcgctggccgctggtggagttgccggtcaggttaaccccgggcatggtgcggatcagttcgctgatgtcgcgcgccggcgggcgttttttgatctcgtcggcggtgatggtggacacccctggcgcctgcaggttctgccgggcggcggtcacgacgatggtgtcttcgccgcgcggctttttatccgtggcgccgctgttctcttccgtggtggtggtgtcggtttgctgcgcggcgctggcgaacgcggacgcgcccaatcccaagccgataagagtggctaaagaataacgtgatagcttgcttttcatctgagtgtcctaccttgctgccatccctcgccgaacggggggaagggcggttgtagtttttgtgtagtcggaaatagaaaatcggctgcggcaagggatgccattgatgtatccccgatccctgtccgttgcgcgcaataccagcacgatctccaagccttacacactattgcaaatgcaaattattatcaatagtatttggcgtacagtgcgttcgggcggtggccggcgatagggaaaagtcgacgttcccggtgccgccaactacaaaatgggtaggcgttgtgaatacagaactacagtcagaaagcagcagattattggccagcagcaatgcgggcagtccagggtggtggttgacggtggcacgacgcggtacgccatgggtagaaccggcgggtaacggccgctggcgcaccacctttttctggcgcgatccccagggatgcgaattgacctccgcctaccgtcgcgtgtggatcaacattaactgcctgaccgaccaccatcagccgaatccgccgcaaagcctgcagcgtttggccggcaccgacgtgtggtattggcagaccgaactgagcggcgcctggcgcggcagctactgctttatcccctgctttgacgagcggccgccggcgttcagcggcgacgatgcgcacgccaacatgcacaacctgcgtcactggtggcatcaggtgttcgccagcgctacccccgatctgctcaacccgtatcgctcctggcaaagcgccagcggtcacagcgtctccggtctgcacatgccggatgcgccgccgcagccggtatggcgttcgttcgacgaatatgagatcgccagcgggcgctgcacgccgccgctgccggcgcgtttgcagcggcatacctggcagagcgagcgcctgggcaacagccgcgatgtctggatctacaccaccggcgacagcaagccggccgagcgcccgctcgcgatcttgctcgacggccagttctgggcgaagcagatgccggtttgggcgccgctgatgcagctgacccgcgagggggcgttgccggaagcggtttatgtgctgatcgacatcatcgatctgccgcaccgggcgcgagaattaacctgcaaggacgatttctggctggcggtgcaggaagaactgatgccgcagctggccgactgggcgccgcacagcgacaagccggccgatacggtggtggcggggcaaagctttggcggcctggcctccctgtatgccgggctgcgctggccgcagcgcttcggcgcggtgatcacccagtccggttcctactggtggccgcggcgcgacatgctgcagctgccgagcattcccgacgacgcctgctggctgatgcaacaggtagaacggcacggcttgggcaaccacggcgcgctgaaggtctttatggaagccggttcgcaggaaaaactggtgcatcgggtcagtggcgaaatggcggcgcgcctgagcgacgccggccatcgggtgcactaccgggtggtggagggcgggcacgatgcgctgtgctggcgcagcggcctgaccgatgggctgcaggcggtatgggcttccgctttcgccaccgcttacccggcatcggcgacggcacgaggaacacatgatggaaagcctgaatccgttcgatgatcaacagcagcgcagcctggtgctgcgcaacgtacaacaacaatacagtttgtggccggatttccgcgccattccgtccgagtggacgatcgtctttggcccggcggcgcgcctcgagtgcgccgaatggctggaacagcattggcaagatattctgccggtcgcagcacgcgaggcgtgaccggcgccaggtaatcacgggagcaataagcagtgtcacacacccctaactctctcagcggcccggcgcttgcgggcgaatggccgctggtcgcggcacaacccggcatctgggtcgccgatcaaatctccccgcatcgcaatgcctacgcggtggctcacgccatcgaactcaacggccctgtcgccgtggagcctctgctgcaggccatcatccagggtctgggcgaggtggacatgctgcgcctgcgttttgcggaacgcgacggcgtgccggtgcaatggctggatgacacgctggcggtgcacgcgccggaacttgtcgatctgacgacgtcgccggatcctgaagccgccgcgcgcgcgctgatggacatcgatctggcgagcgatctgcgcgccggcagcggcgcgccgctgtatcgtcatgtggtgatgcgtctggcggatgaccgctggttctggtatcagcgctatcaccatctgctggtggacggtttcagcttcaccgccatcgcgcgccgcgtggcggcgatttacacccatctttgccgcggcgacgcgctggaaccgacgcctttcacggcgttcagcgacgtggtggcggaataccaggcttaccgggaggcgccggcctggcaacgcgacgccgatttctggcgcgaaaaagcacggcagctgccgccgccggccacgatctgcccgcagccgctggccgggcaaacgcccacgccgcgcatccaccggctggaacagcgctgcgatccgcaggccttcgccgaactggtgcagtgcggcgcgcagcagaagctgaacgccgccgatatggcggtggcgctggtggcgctgtgggtgtcgcgtctgagcggccaaccgagcttcagcgccggttttatcttcatgcgccgtaccggatcggccgccctgtgcgccgccggcccggtgatcaacgtgttgccgatggagatgcacctcgagccgcaggccacgctgtatgaggccgccgcccgcatcagccgcgagctgaaaacggtgcgccgccatcagcgctacgacgccgaacaggtgcagcgcgatctggggcgcatcggcgacggcgaaccgctgtacggtacggtcttcaacttcaaaatgttcgattaccagctggacttcgccggtatcgaaggcattacccacgatctggcctccgggccggtgcgcgatctggagattgcgctgtttatcgacgaacaccatcagctgaaggtggagctgctggccaacgccgagcgttacagccgtcaggaactgctggcgcatctgcagcggttgccgctgctgctggcgcagttcgccgcgcaggcaacgttgccgatcggcgaagccgacatgctgaccgccgacgatcgcgctctgctggcgcgggtcaacgacacggcgcatccggtgccggcgaccacgctgagccaactgctggcgcagcaggcgcaaagcacgccgaacgcgccggcgctggcggatgcgcatttcagcttcacctaccgcgaaacgcgcgaacaggtcacggcgctggcgcgccagctggttgtgcagggcgtacggccgggcgacatcgtggcggtggcgctgccgcgctcggtgttcctgtcgctggcgttgatggcgatcgtggaagcgggcgccgcctacctgccgctggacaccggttatccggacgagcggctggcgatgatgctggaagacgccgcaccccggctggtcatcaccagcccggcgcagcaggcgcgtttcgccgacaagggcgaaattttgctgtatgacgcaccgctggcggccgatcacgccgccggggtggcgatcgcgggcccgacgccggatcatgcggcctatatcatctttacctccggctccaccgggcgcccgaaaggcgtgctggtcggccatcaggcgatcgtcaaccgcctactgtggatgcaacaccagtatccgctgggggcggacgacgcggtgctgcagaaaacgccgtgcagtttcgacgtctcggtgtgggaattcttctggccgctgatggtcggcgcccggctggtgatggcgccgccggaggcgcatcgcgatccgcagcagctgcaacagctgatcgcccaacatcgcattaccacgctgcacttcgtgccgtcgatgctggcggctttcgtggccgccctggacgacgacgcggcggtggcgagctgcgccgcgttgcgtcaggtgttctgcagcggcgaagcgctgccggcggagctgtgccgcctgtggcaaagccgcacggcggtgccgttgcacaacctctacggcccgaccgaagcggcggtggacgtgacctggcatccggcctacggcgacgcgctggcgaaggtgaccggcgccaacgtgccgatcggcctgccggtatggaacactgggttgcgcattctggacgcgcgcctgcggccggtgccgccgggcgtggcgggcgatctgtatctgaccggcgtgcagctggcgcacggctaccttggccggccggatctgaccgccagccgctttgtcgccgacccgttcggcgagggcggacggatgtaccgtaccggcgacgtggcgcgctggctgccggacggcgcggtggaatatttgggccgcagcgacgatcagctgaagatccgcgggcagcgtatcgagctgagtgaaatcgatcacgccttgctgtcgctgccgggcgtgcgccaggcggtgacgcacgcgctggtgttgcagggcactccggtggacgccggcggcgatgcgcgccagctggtgggctatctggtgatgcagccaggcgcgagctgggatgcggaagccctgcgcgcggcgctggccgaccgcctgccgccgcacatggtgccggtggcgctggtggaaatgcaggatttgccgctgagcgccaacggcaagctggatcgcaaggcgttgccgcagccgcagagcggtgagcgcaaggcggggcggacgccgcaggccgggttggaaagcgagatcgcggcggtattcgcccgcttgctgcagcgcgagcaggtgttcgccgacgacgatttcttcgcgctcggcggccactcgctgctggcgatgcgcctggcggcggagctgcgccgcgatctgggcaaggcggtgtccgtcggccaggtgatggtggcgtcgcgcgttgagcaactggccgccttgctggcggaagatcgcacgcaggaagaggccgatcgcagtggcttcgacagcgtattgccgctgcgcgttaccgaggggccgacgctgttctgcctgcacccggcatccggcttctcctggcagttcagcgtattgccgcgctatctcgaccagcactggtcgctggtcggcatccagtcgccgcggccggacggcccgctggcgctgagcgaagacatggatcaggtggtggatgctcacctgcagacggtgttgcaggtccaaccgcacgggccgtaccacttcatcggttattcgctgggcggcacgctggcgcagggcatcgccgcccggctgcaggcgctcggcgagcaggtggcgttcctcggcctgctggatacctatccgccggagacccaaaactgggacgtgatgctggacgacaacgtgttgaaggaagtgcagcgcgagcgcgagcagttcctggcggtgtcgcaggacacgctcgatccggcgctgggtgagacgcgcacggcgatgttcgacaacatcgaagccaactacgccgattcggtgcggttgttgtcgcacacgcggaccgcccgtttccacggccaggcgacgctgttcgtcgccaaacgcacgctgcaggaagggatggacgtgcagcaaacctggtcgcagtatgtcgatgcgctgcaggcgcacgagctggactgcgcgcacgtcgatatcgtttcgccggcgtcgttcaaagtgctggggccgctgctgaaccggatcttgcgcacgctgtaatgacgccctcatcccgccgccaggcacggggattgccccgcgtttggcggcgtttcttgcggtcgctaacaattgaatatcaatgatttttattatcattattgatttcgtcatctgtgctagcatagcgctccgcaactgcagaatccccgtttaaagatgtggtgaacaaccgatgagtagcaaaccctccatcctgcttgatttcagcctgctgaaaaccaaccgggctttccgcgcggtgttctgcgcgcgctttatctccattgtggcgctgggactgatggcgatcgccatcccggtgcagatccaggcgctgaccggttccaccctgcaggtcgggctggcggtgacgctggccggcggcggcatgttcgccgggctgctgatggggggcgtattggccgatcgctatgagcgacgccggctgattctgtttgcgcgttccacctgcggcgtcggatttgtcggcctgtgtctcaatgccctgttgccgtcgccttcgctggcggccatttatctgctggcggtgtgggacggcttctttggcgcggtgggggtgacggcgctgctggcggccacgccggcgctggtgggccgcgaaaacatcgtgcaggcgggcgccatcagcatgctgacggtgcgcttcggctcgattctttctccggcgatcggcggcctggtgatcgcccatatgggcatcacctggaactacggtctggcggcgttcggcaccctgctgacgctgctgccgctgctgagtctgccgcagctgatgccgccgccgcagccgcgtgaacacccgctgcgcgcgctggcgggcggtttcgccttcctgttccagaacaaggtgatcggcatggtggcactgatcggcgcgctgctgaccatggccagcgcggtgcgcgtgctgtacccggcgatggcggaaggctggcacatcgacgctgcccacctcggttatatgtacgccgccgtgccgctcggcgccgccatcggcgcgttcaccagcgggcgcgtggcgcatgtggcgcgccccggctgggtgatgctgctgacggcgatcgcggcgttcgccgccatcggcctgttcggcctgatgccgtggtacagcctggcgttactgtgcctggtggcgttcggctacctgagcgcgctgaactcgctgctgcaatacggtctgatccagagcctgacgccggacaacttcctcggccgcatcaatggcctgtggacggcgcagaacgtggtgggcgatgcgctgggcgcgttgctgctgggggcgatgggcgcctttatgctgccggcgatgagcgccagcggtttcggcttcggcgcggcgctgctcggcatcctgttgctgttcgccatgaccggtttgcgccaggttacgctgcacaaaccggagccgcagcccgccacagaaaagtagtcgaacgcgttaaaacaacgctgtgggatcaaatagcaatgcttatcatcggcatgcgtaaaacccacagcgtttatgtcatgatttcgaaatgaaagaagtgcttacgtttattgacatagcaaatatcggcgagtaatttagcgcggaattaactcaaatgataatcattattatattggttatcacttcaaattcttgagggcgaagcgatggatactgccgtgaacgacatcaatcgaaaggaagtgcaggagtgcgaagagcagcgatttgccgctgatttttctcccgcgtcgggcttcttctttacttctcctttccgtagtctgaccaccaccggttgtttcagccgcattcgcctgccggccgcagacggcgccgatctgaacggcgagttccagcgcagcgtacggcaggcgtttgccgaggcccgccaggccggcatcaaaaagccgctgctgtgcggcgccatcccgttcgatacccggcagccttcggcgctgtttattccgcagcagagccgctggttcgatcgcgccgcctttatggccggcgttaggccggcggcggatgggccggagctggccggggtaacggaactgccgccacagcagccgttcatgaatatggtcagcgacgccgtcgacgcgatgaaggccggtgagttggacaaagtggtcttgtcgcgcctgctggagatcgaaacgcgtcagccggtggatcgccatgcgctgatggcgcgcgtgattgcccaaaacccgcacggtttccatttccatgtgccgctggagcagggcgcgctgttgggcgctagccccgagctgctgctgcgccaggacggcggccgtttctattccaacccgctggccggttccgcccggcgcgaggccgacccagagcgcgatcgcgaagtgggagagcggctgatggcctcggcgaaagatcgccacgagcaccgcatcgtcaccgaaagcatgcgtgacgtgctggccggccgctgccgctacctgaacgtgccgcaaacccctgaactgctgaccaccaccacgctgtggcatctctccacgccgatcgacggcgaggcggcatctcccgacgaaaacgccctgtcgctggcctgcctgttgcacccgacgccggcgctgtgcggcatgccgacggcccaggcgcacgccctgatcggcaagctggagccgttcgatcgcggcctgttcggcggcatcgtcggctggtgcgacgatgaaggcaacggcgagtgggtggtcaccatccgctgtggcaccgttgacggcaaccgggtgcggctgttcgccggcgccggcatcgtggaagactcttcacccgaatctgaatggcatgaaacaggcaccaaactcagcaccattctgcgtgcctttggtataaatcaaggataacgacaagatgagcattgcctttaccccctggccggcggagttcgccagccgctatcgcgagcgcggctactggattgacaaaccgctgaccgagatcctcgaccgccaggccaacaacgacgccccggcgatcatcgacgcccagggcagcctgacctaccgcgagctgcagcagcgctccgatcgcctggcagccgctttgctgcgccgcggcgtgaaatccggcgacaccgcactggtgcagctgggcaacgtggcggagttctatatcgtgttcttcgcgctgctgaaaattggtgtggcgccggtcaacgcgctgttcagccatcagcgcagtgagctgaacgcctatgccgagcagatcaaaccggcgctgctgatcgccgatcgccagcacgcgctgtttgccgacgatcaattcctgaacgccttccgcgatgcgcatccttcgctgcgcgtcgtggcgctgcgcagtcaggccgagggcgagctggcgctggccgcctggctgaacgaagcgagcgacggtttcgtcgcgcagccttccgcggccgatcaggtggcgttcttccagctttccggcggcagcaccggtacgccgaagctgatcccgcgcacccacaatgattactactacagcattcgccgcagcgtggagatctgccgcttcgacgcgcagacccgctatctgtgcgcgctgccggtggcgcacaactacccgatgagttcgccgggcgtgctgggcgtgttttatggcgccgggctggtggtgttcgccgccgatccggacgccgggcaatgcttccgcctgatcgaacagcaccaaatcaacgtgacggcgctggtgccgccggcggtcacgctgtggctgcaggcgatcgaagagtggggcggcaatgcccagctcgccagcctgaaactgctgcaggtgggcggcgccaagctgggcgaaacgctggcggcgcgcattcagaacgaaatcggctgccaactgcagcaggtgttcggcatggcggaagggctggtgaactacacccggctggacgatgacgaacgccacattctggcgacgcaagggcggccgatgtcgccggacgacgaagtgtgggtggcggatgacgacggcaatccgttgccggcgggcgaggtcgggcggttgatgacgcgcgggccttacaccttccgcggttactaccagagcccggcgcacaacgccgatgctttcgacgccgacggtttctactgctccggcgatctgatcagcatcagcgaagacggttacatcaccgtgcaggggcggcaaaaagaccagatcaaccgcggtggggagaagatcgccgccgaggagatcgagaacctgctgctgcgtcatcctgacgtgatcaacgccgcgctggtgtcgatgccggacgcgctgatgggggagaagagctgcgcctatatcatcgccaacgcgccgctgaaaccggtggtgctgcgccgtcacctgcgtgaacagggcgtggcggacttcaaactgccggatcgctttattcaggtggacagcctgccgctgaccccggtcggcaaagtggacaaaaaacggctgcgccagcagctcgacgcgcaactacagactcaggctcaggctcagggagattaatcgatggccattccaaaacttaatgattacgcgctgccgacggcggacgaactgccgcaaaataaagtcatctggcaggtggagccgcagcgcgccgcgctgttgatccacgatatgcagcagtatttcctcaacttctggggcgaggacagcacgctgattaaacaggtggtggagaacatcgccaacctgcgccgctactgcaagcagcagggcatcccggtgttctataccgcgcagccgaaccagcagagcgatgaagatcgcgcgctgttgaacgacatgtgggggccgggcctgaacaagcaccctgagcagcaggcggtgaccgccgcgctggcgccggacgaagacgatacggtgctggtgaaatggcgctacagcgccttccatcgctcgccgctgcaggaaatcctgcaggagtccggccgcgatcagctgatcatctgcggcgtgtatgcgcacatcggctgcctgaccaccgccatcgatgccttcatgcgcaacatccagccgttcatggtggccgacggtctggcggacttctcgcgcgacgaacacctgatggcgctgcgctacaccgccggccgctgcggccgggtggtgaccaccgcgtctctgctgccggcggccggcatcgccagcattgatgcgctgcgtcagcagatcctgccgctgctggacgaagacagcgaggacatgggcaacgatgaaaacctgatcgattacggcctggattcggtgcgcatcatggaactggcgacccgctggcgcaagatccgcggcgacatcgactttatcgcgctggcgcgcaacccgaccatcgacagctggtgggcgctgctttccgaagagaaagcctgattttaatcacgagcagagggcggccgttcggccaccctgttggctttataaggagattttgatgaatactttgatcaccaagggaaaacgtgcggcatttccgctgatgctgctgtctacgctgctgttctccaacactttgcaggcgcaaaccgcgccggaagtgctgcgcaagccggtcggcaaaggcgcctatgaaatggcctacagcccgagcgagaacgcgctctacctggccacctcgcagagccgcaagctggacaagggcggcatcgtttaccgtctggatccgaccacgctggacgtgacccaaattatccataacgacatcaagccgtttggcgccgccgtcaacgccaagaccggcacgctgttcttcggtaacaccgtcaataactcggtgaccgccatcgacgccaagaccggcgacgtgaaaggccgcctggtgctggacgcgcgccagcgctccgaaaccgtcaagccgctggcgccgcgtgaactggtggcggatgctgacagcgataccctgtacatcaccgggctgggggattccagcgtggtgtgggtggtggacggcaaggatctgaccctgcgcgccaccgtgaccgacaccggcaaatacggcaccggcctggcgctggacgccgccgccaaacgcctgtacgtcaccaacgccgacggcgagctggtgaccatcgatacccagagcaacaaggtgctgtcgcgcaagaagctggatgagtctaaagagcacttcttcctgaacatcagcctggataccgccacgcaccgcgccttcatcaccgattccaagcagccgcaggtgctggtggtggatacccgtaacggcaacatcctgagcaagatcgacgtgccggaatcgctggcggtgctgttcaacccggcgcgcaatgaagtgtacgtcacccatcgccaggcgggcgaagtgagcgtgatcgacgccaagagctacaaggtgctgaacaccatcaagacgccgacccatccgaacagcctggcgctgtcgccggacggccagacgctgtatgtcagcgtcaagcaggcttccagccgcgaaaaagaagccaccgcgccggacgacgtgatccgcgtagcgctgaagtaatcccgcgcagggtaagtatccctcgaacaggcgaagcggcgacgctccgcctgttttttttcgccgtgcgatctacggtataaagtgtggattgccttattgacccgaaggaacgttggttatgcccgtctcacgcgcaccgctgttgttgtccgttatcactctgctgctgctggccgcgctgatccacagcggcatcagcccttacgatcgcaccacctggctgatggaggtggcgccggtcttgatcgttttgccgctgctgtggctcccccaccgccgttacccgctgacgccgctgctctacacgctgattttcttccacgcgctgatcctgatttttggcggcatgtacagctatgcccgcgtgccactggggtttgaggtgcagcagtggctggatcttgatcgcaacccgtacgacaaactggggcacttcttccaggggctggtgccggcgctggcggcgcgcgagatcctgctgcgcggtggttatgtacaggggcgcaagatgctgggcttcgtggtgtgctgcatcgcgctcgccatcagtgccctgtatgagctgatcgaatggtgggcggcgctggcgctgggccagggcgccgacgagtttctcggcacccagggcgacccgtgggacacccagtctgacatgttctgcgcgctgctcggggcgatatgcggcctgttgctgttcgggcgctggcaggatcggcaaatcactcgcttagtttgataaatttcaaacagaattagcccgccgttatggcggggttttttatatatatcgcaatgaacgttgtcgcatcaagcgaaggccgggagccttaactgcgccaaggttccgccgttctctatgatttgctgtttatatttcattgttttatatgaacttatatttaatttgtaagaattttcttattataattgctgtgctaatatcatgttgtttggtggggaattggcgttgacatggtttgtagcgcagggaatgtatgagatacataattaataataatattaaatatcacgaagatagatcggaattggtctcggtgcatgacgatatcccgccgattatgctgacggccacactgaaccgcctgctttccacattagtcagaaacaacaatctggtgttatccagagagacgttgttgacgcaggtgtgggaggctcacggtcaggtcgcttccggtaataacctcaacaataccatttcaattttacgcaaggcgttctcttcgcttggcgaggaggagatcatcgtcaccttgccgcggcaaggttttatgttcaccgccgctacgatcaaaacggcggacagccaggcgcccgcagaggatccggctccggaggtgggccaggatgtgggtatcccctctgaggtaggctccgccgctgtacgcagctatacgcgtttcaaagccgccgggctggcggctttgttggttctggcgttgggcagcggtatttgggcgtggtgcgatgcaggctatcagccgatcagcacgatcgacggggggcgcatcgacagctgcagcgtgcgccttatcaccacttatcacaagccggcaatcaacaaggtcgatttggatcatctgcgcgacatgctgaagcggcggccgcagattcactgcaacgaaccggcgacgctgctctactacgacacgcaaacactggtgccaaacggcgccgggagaacccgaacgtcctatttctattactgcccagagtcgcaaatggcggataacaaggtgcaatgcgagagtttctatgaaagctggggcctgtaagcgatgaaacgatatggttacgcgattgcggcgttactggctatggggtgctgcgccatcgccggttactttttatttttcagaccgcaaatcccggagtgccgggcggttgaacacgtaactgacaacattgccggccgcagcgttgaacgcattgttctgataaatgtggttcccgatggcccgcggcgtatcaacatattattgaacggcagagtctatgacggtaaagagcactatgttgtctcacgtactctggttctggattatcgatggcagggcaataactatacgctgtgggtgaaggaaaatatcaagaaaccgcatgactcgataaggcttgaggattttaatcggcggttgccggtggaaggtatgcagttacactggcgtatcgagcaaattgatagccggcatttcttgtttgccgataaccatgcgccgttatttgtgtgtgctacaccctaagatgaatccccttggttaggacaaggggatcctgagagtgagatggcctggtgaggtaacatcttgcaatatcaatgctattctttgtcgatataattgtagatacacgggctgcttttttctcgcgggcagaaggttaacagctctttgcctttctgcgaagcctcatcgcgaatgttatcatagtaatacacgtcagctttacttctacaattaaaaccagcgcgctggataaatcgcttgatttcggataagtggccgctccccgaattcatgctgtatatttggcagcgatcgtagtcacctaaaggatacatgctgatacgggtggcgttttgataaagcacgatagcggcaaacggcaccaggcaggctaaaaatgccagcagaagacgcctgaatgggctattggtgccattatgcagcacttctttattggttagtttactgacctcattatctccctctggattgttttccggtttttttacctcctcattgttatttacttcatgaatgatatctgcggtgaacttaaacccctgacgcggataggtgacaataagcgcctcttcgccgaactgcgccagcgatttgcgtaaccctgatacataattattcagattgttgttcgaggccttaagaccatgctcaacccagacatcattaagcagcctttcacgcattaataacacattattgttacggatgaacagtgataacagcctggcgctgggtctaagtaagactattttagttgccgcattatcaatatgcgacaatgtgttctcatcttcatcatagagaacgttgttatttatatggaagatcattttttcaacctgtcaacttacctgtcgagagatgattctgagacctgcgtgctgttttttcaatccttcgtattaatggtcaataggatttttccctctattcatataattatattaatccgggtctaagtgtataagtattaaaaaataaataaggtcatttaatttctattttttggtatttaaatctatttaatgtgtatttttcatatttaaatcctgtgtttttgtctttttgcgacataacgttttatttttgatctgggcggggtaaatttgttgccactgatacggaacgctgaaaggcaggtatcagcgaaagaatctgcgctcgataataaagcggcgcgttaaacatcaagagtgaattgttgatctaattgacgtcaatgagtacctctttcttactaaggaatgtaagggatttaatatgaaactgaataaaatcatgatggcagcagtattggctttcggcgtagcgtctgtggctcacgcaaaagaccagggccacggcaccgtaacctttaaaggcgcgatcattgacgcaccttgctcaattaccccggaaaccgtagaccagaccgttaacctgggccaggtttccaacgtggcgctgaaaaacggcggccagtctacgccgaaaaacttccagattaagctggaaaactgcgagctgaacgctggtgatgcaaatggcgttggcaagaataatgctgtagctatcaccttcaccggcgcagcttcagtagaggacgctaagctgctgggcattaccggtactgctaagggcgctggcatcgccatcaccgacggttccggcaaggtgatcgagctgggtaaagcttcttcagcgcaaacgctgggcaatggcaataacaccctgagcttctccgcttacctgcagggtaacaaggcttctaacgctgttatcaccccgggtgacttccagtccgtggctgacttcaccctggcttaccagtaagtccggttgtgcagtgataatgcagcatgcgggcttgcccgcatgcttttcccgggattcgtgcggtggaaattctgtgaatagggagcattcaatgagttattttcctgcaaaattaatgcttccctgcctattgtccttaatgttaatcgtggataacgttcaggccgctcgccccagtcaaggatggggacaggtcaatatgcaaggagccattatcaataccgcctgcgctattgccgccggcagtcgggaacagttaatcgatatggatgtcacaccggttgcagatattattcgtgacggcagcgggggagctagttatttctccattgagctaattaactgtgttttatctcgggctgagagtaatttgccagactggagtggttttcgggtgacttttgacggggatgccgacggggagttatttgagatgcatggtggggcaaaaggcatcggattgcaaatcgtcgatgcagaaggaaatattgcccacccaggaaacccattgcccattcgagaagtattgccggaaagaatgctgcttaactaccaaatgcggctggtcgctaataatcagccactgcaggcaggagagtattattctgcggtgcgttttaaaatggactattactgaggctgagctctgccgataaatactattaaataaacagggtcgtggatatgtttttttctcctgcatggaagctgtttcgtcctcatgcgctaagtatcggtatatttctggcgttagcgcatttaacgccaaaggcagaagccgagtatggcattcagtttaataccgatattttggacgtgaacgatagaaaaaatatcgacctgagccagttttcacgcagcggctatatcatgccgggcgcctatgccatggtgattcatcttaataacaatgaattgccggaacagagcgtcagtttttatccgccggatgacgatgctcagggcagccaggcctgtatttcaacggcgctggtggaacagctggggctgaaaccggatgcgtcgaaaggactgcgttggtggcatcaggacgagtgtctggatatcgccagcctgaagggcatggaggcgcgcggcgatttagccacggcggcactgtatttgagcattccgcaggcttatctggaatattcctcgcctgactgggatccgccgtcgcgctgggatgagggcattccgggcctgctgtttgactataacgttaacggccagactcagcgccaggagcggagcggtgggcagagtaacagcctgagcggcaacggtaccgccggcgccaacgtcggtgcctggcgattgcgcgctgactggcaggggcagctcaatcaccaaaccggcagcggccagggtaccgatcagcggctggactggagccgttactatgcctatcgggccgtttctgcgctgcgctcgcgcttgacgctgggtgaggactacctcaactccggcctgttcgacagcttccgtttcaccggcgttagcctggtgtctgacgacaacatgttgccgccgaacctgcgcggctatgccccggaagtggtcggggtggcgaaaaccaacgccaaagtcaccatcagccagcaggggcgggtgatttatgagactcaggtggcggcggggccgttccgcatccaggatatcagcgaggcggtctccggtgagttggacgtgcgggtggaggagcaagacggcagcgtgcaggcgttcaagatgaacaccgccagcattccatacctgacgcgccccggttcctggcgcttcaaaatggcggcgggcaaaccttcagactggcagcatcgcagcaatgggccgctgttcggcaccggcgagttttcctggggggtgagcaacggttggtcgctgtacggcggcggcctgttcggcggcgactacaacgcggcttcgttgggtatcggccgcgatctgatggcgctgggcgcgctgtcgttcgacgccacccagtcgcgggcgcggttgccgcagcaggacggcacgctgagcggcggttcataccgcctgagctattcgaagaccttcgacgagaccgacagccaggtgaccttcgccggctaccgcttctcggagcaggactttatgagcatgagcgagtatctggacgcgcgctactacggcggccgggtgggcaacaacaaggagatgtacaccatcacctttaaccagcagttccgggatatcggcctgagcctgtacctgaactatgaccaccagacctattgggatcggccggctaatgatcgttacaacctgacgctgtcgcgctatttcgatatcggccgcttccgtaacctgagcctgtcgttgaccggttaccgcaacaagtacgaaaacaccaacgacgacggcatgtacctgtcgctgtcgctgccgtggggacagagcgccaacctgagctacagcgcgacggtaaaccgtcacgataatagccaacgggtggggtattacgaccggctggatgagcacaacaactatcagctgaacatcggtagcgccagaaacggcgccagcttcagcggctattacaaccgtgagggcgatatggcccagttgagtgccaacgccagctatcagcagggcagctacagcgcgctgggcttcagcgcgcagggcggtgcgaccttaacggcagaaggcggagcgctgcaccgcatcggcatgccgggcagtacccggctgctgctggataccggcggcgtggccggggtgccggtgcgtggttacggcagcaccgtagataccaaccgctggggcaaggcggtggtgacagacgttaacagttactaccgcaacaaggccagcatcgatctgaacaagctgggagaaaacgccgaggctaccaaatcggtggtgcaggccaccctgaccgaaggggcaatcggctatcgcaagtttgatgtgatcgccggggagaaggcgatggcggttatccggctggcggacggcagcacgccgccgttcggcgccacggtgatgaacgccagcaaacaggatacagggattgtgaacgacggcggcagcgtctacctgagcggcatccggccaggtgaaagcatgaccgtgcactggaacggcgcggcgcagtgcgccatcagcctgccgcaagcgttgccggctgacatgatgagcaacctgctgctgccgtgccgggcgctgccggccaatgagccagaggcgtaatgaacgcgaacaccctatttgaatctgtaagagtgataaacgtatgaaaaagaactttaccatgagcaaacatcaattgctgaccgccgcgctgttggccgcgctgctggcgccgcaggcgcaggccgctatcgcgctggatcgcacccgggtgatcttcgacggcagcgaaaagtccgtcagcctgaacatcagcaaccagaacaagcagttgccgtacctggcgcagggctggctggaggacgaaaagggcaacaagattcagagccctctggccgtgttgccgccggtgcagcgcgtggagccgggcaagccgagccaggtgaagatccaggcgctgccggcgaccaaacagctgccgcaggacagggagtcgctctactacttcaacctgcgtgagatcccgccgaagagcgacaagccgaacacgctgcagattgcgctgcagacgcgcatcaagctgttctatcgcccggcggcgattgcaccgcagcagaatgccgcgccatggcaagagcaactgacgctgagcaagcagggcgacaagtatgtggtgaataatccgacgccttattacgtcactttggtggacgcaggggccaggaaaggcgtggctggcgtgcaaggtttcgagccgttgatggtgccgccgaagagcagtgcgccgctcggcgtcaacgccagcgcgttgggtaacggcccggtgttgacctatatcaacgactacggcggtcgcccgcagctgacatttaactgcagcggcagcgcctgccaggtcgtgccggaaaagagcaagtcgtaacaccatcggctgtggcgggtcatcgggaggaataaagatgcaatggatgagcgagaaactgagaaaacacctgccgaagcgtcacgactgtcggtattacggcaccttgggcgggctggcgctgatggtgcccctcaccctcggggcgatgctgtggctgatgccggctgcgcaagggcaggtggcggataactggtacaccgacggcgccaatggcgtgctgcaggtgcgcggcgcgctgacggagagcgcctgtcggctggagatggaaagcgcgtggcaggttatcagcctgggggagatcggcaccgggcgcctgcagaatattggtgaccgcggcgtgccggtagcctttgagttacggctgagagactgcctgcgcagcccggccggcagccgggattcacgcaccggcgccttaacctgggccaatgatcaaccggcggtaacggtcactttccgcgccgggcaggatgcggataatccgcagctggtcagggctcagggcgttgccgggttgggattgcgtcttaccgacagccgtggacaggatgtgcggctgggcagccgcggggaaccgctgctgctgacgccggggcagaataccttgagctatagcgtggcgccggaacgcacggcggcccgtctggcggccggagcctatcgtgccacggtggattttagcctgagctatgactaaggagttgagaagtatggcgcacatattcagcccggccggtagttgcagcctttggcgcaatgcggcgatgtgtcttctctgtgtgggaatgtcaccattggccaatgcggcgaccactgtgacggtcagcgtcaccgtactggaaacaccgtcttgcgtgattaacgacaataaaaccatcgaagtggacttcggcgagatcctgacggtcaaggtggatggcaacaattataagaaatcggttgattatacgctgaaatgttcgggcattaagtccaatgccatgcagatgaaaattcaaggcggtgcgaccgcgttcgatgcttccgcgctgcggactaatatcagcgacttcggggtggcatttcgttctgatgggaagccattgcccattaatagctggctgaagttcacctactcgggtagtcaggctccgccattagaggctgttccggtaaaaagagcgaatgcgaagctgcccggcggtgactttactgccggcgccaccctgctgctagcctatcaatagaggagaggcaacgatgaaaaagcttggcatagtttgcctcatcctattgggtatcactgctcgagaggggatagcagtggaaaacatgagtttcaaagggacgctacgcgaggatgtgccctgtgagctcaatgatgggcaaccgataaacgtggattttgaaacggtgggcgttaataaaatcgatggggagcgttacaagaagtcgttttcggtgaaggtgagttgcccggcggaattcgatgttgcctataagatttactatgtcggtcaacccagtagttttgatacggcggcgttggccactaacgtcaaggggttggggattaaggcgcagtggcaaaaaaatggcgcttttgttgatcttggcgtcggcggtgcgattaacggtctggctgatatggatcttaatttccaggtggtgcctgtccggaaagtgaatacggagctggtgccgggtgcgttcaatgcctccgcatcgttcctgcttaaatatgagtgagctcgcagttgttaactgcgcgaggggaaatgacgagaaagagagcaagatgcttatgccggtgtgactacagttgcctgaaattgatattcacggtagctgactcatgcctcgtattcttaataggttcagtgagcgagactcaatataatggttaacacgttagccagatcaaatgtagtaagaagtttttttatattactgctcttatatacttcaggcgcgtgggcggggtggagtgctgacattcgatattcccccagagaaaaacagtattttgccaaagtcacttactgggatactggtgatgtcacgccgaatccaatgtatggttgttcttatctatgtagtgtcaccttttgggtagtagccgctgggacgacgggttctcccatgaacgaagtgagtttcccaggactcacgaccagcaagaccatgggggaactggcgcaaagctttgctaattcaggattctttaatagggagttctatagtcgacaaggctttcctgacaaaaatgtatgtgtcttttttggctattgggggaggtaccccggaggggcttatggccctgctcgttttcctggggggatgcaatgcgttccgccggtgattgatcccacctattgtgacctggcggaaaaagagattgagctgcgtcatggcgtgctgcgcgacgaggaggtgaatggtcagactgttagcacctcgctgcatgtgacgtgcagttccaaatatccggtgcgaattatgtcggcagacagagtcggcagcgtttactttaatggtgggaaacagttccggagtgaactgaaaatagatggcaaggatttaggtgaagggaaagttgttgaggcaacgccccaaggggtaacgctgaccttaagttccacgctgatgggatatgatggcagtattggggtgtttcagggctctaaaacgatcattgtttctttaccttaatcggtatgggtatttccagcgtgattttcataaaaaacagcagcactaatatttctatagtggagtttaaaggtgttgcttatcttgccacacaaggcgcggctataaatacgttaggtgtccataggctagaatattttggagaccgataggtaacgagatatctctacctctgtgccgcgtcgtcatcgcggtactgcgtgacgacctggtgaacagatatatgtggcgaagcaacagtgtgcttgtaaatctgagaatggcatttgcgagtagtaatgtttccgattttttaattaattgcctggcgaatcggacaaatatatgactggtgatgggcatctgtgacggagggtatcactccatcttgattatgactgtgcacatcgcggatataagcgtttctatactatatcaaccaggaggaagggatgaaaaagacagcgttagcgatggcattgctgtgtatgagccataccggttggggggccccgcctacggtggcggttaactaccgtggtgagctggtggcggagccctgcgtgattccccctggagaggaaaatatcgagctggattttggcacggtgattgataaatatctttatctcaatcagcgtacggcggggaaagcgttttctctacagctgacggaatgcgatctcagccttggcgaaacggtaagcgtttccttcagcggtacggaaagcgctgcgctgccggggttgctggctatcagtagcggtggtgcgagcggcatcgccattggcctggagaatgtttcaggtgagctattacccttgaatcagccttcggggaaactgcgactacaggaaggaagcaatagaattacgcttaaagcttatgtgcgtggtgaacctgaggctattaaaaacaaaagtatcgccagaggagaatttgtcagtacggctacatttttacttgattacgaataatagactgtaagcgatacgagtagaataaatatcgtagtatatccggtggaaaactttaaaacaggccgagcagaataccaattttgtacggaataaaattatcttggccgacaagaggtgttacatgggaacatttaatatcgtaatagatgatgagaatcgctattttgctgaggggcttcgactcagtattgaaaagtatgcgcagaatcgcaataaatccgtcaattttttatcaccggacggtgaggggcataccgacatggttgttgcttcttcactgcggcgtgcgcaacgctggcgcagggcgaatctttcaggcgcaccgtttatccttaccgttaaggaacggcctgttttagctgcgaggggtatctctggcgtgctgtaccgaacagataatcagaacaagctgtttgagttattgtctgaagcattgtcctgttctgcgttcccggctaccgctaagcggcaaatcttaaccggcagagagcggcaggtggttggttatcttcgtaatggattcgatcaatcccatactgctaggttgctggggttaagcgtcaagacgattcatagccataaacgctcgataatgagaaagttaatgttaactcggcatcatgagtttatttattggttattgcttcatggtgatgaatatactgaaagttgatatatttcattcctgttttccatccgcggctctttctatttgtggttgggcattgggaaatagtaccgagctgagatatcttgttaataaccgcatgaggtggttggtttttgatattggagcacgatgatgttgaagggacgaattaagttgcgatttatattagccttgaaagtgggagccttgctcttttttccaatcagcgctatagctgattggaaaacggcggcagaagtggaaattataccccccaactcaccagggcagggaccggctgttcagggaatctggcacgtttatattaaccaatgggataccaatgatctcaggcctaaccctatgtacggctgtaacagctgtgctctccatctgcggtataggttgccttggtggggatcaggtcatgatgctcaggtatttgccgacacaggaggctggcttagcaacagcaagacgcttggcgaagtggctctgggggctcaacaacaggggctggtcggaccgaatgcgactcgatatcttgttagatcagtgagtggttgggggctgtgtgcctacttagcgtactctgaccatgctgtgattaaaggcactattcttggtggtgccatagatgcgaatcgctatccggcttgcgaggcgcctgtagtgcaccctactcaatgtaatattcgtgagccccaggtagatattcgacatgggttggttgcaccagacaaagttaacggcagtcaggcttcggcacagattaccgtttggtgcaatgaaactttgccggtgcgtattgtcgcggcagaagcgaatgccactgactttattagcctgagtaaagccagtaactttcgtagcatcgtaacgatcaacgggagtcccttctcgaaaggtgcctttattgatgccgggtcggccggtacgaaagttaatttgacctcaacgctggctaattactctggtgaagtgggtgattttcaagggagcgctacaattgtggtatccattcaatgaaaaagtgatcttaatgctttactaggttacagaaggtatcctgaatggaagagtattcctaaccttgattagggatggtctattgcttatttgttgttaccctagttctctctgttgtttcaagcttgaattagaccgctacacggcagtgggcgagtctgctggggatttgctaataatttcttatcgataagcaggaatgagtcctgcttttttggctcataacgcgctatggcttatgagttatgaaaaactatttatcaagtgaatattatattttgtgtggtgccgaggtgtacccagggaaggtaaagtggatcttttttatctggcgatttttttgttttttctgagtttatatgcgtttttcaaacacgatcagcgtatgaagaaaaggcgattggcgataggtggaagagggcattagccgcaacaggaaaccggtacagggtctgccgcacagggaaataaatacaaacgggtaattcaataaacaaggagaaggacatgatgagaagaaaaatcgcattactgggttgcacactgctgatgtgttcgcagctggctcaggccaagctggtgattgaaggtggtcttaatggcaatatcggcagcggcaacggtgcttcagttgacgtcagcattaacggcagcactaacggcaacaacggcaacaacggcaccggtgtaaacgttggcggttcgcaaaagccggattctagcgccagccaactgcaaaaagacatttacgcgtcaatttgcgccagcccgtttatgaagaaatacgcttcgatttgtcagtaaggatgtatgtaattaagcccgccacgactatggtgggctttttcttcgttttgcccgccataggtatctcaatcttgccgttcaggcttgatgtaggcaatgccttgttcgtcatacagagtgtaaatcatccgcaacagtgtcctgatatcttcagattcatccaactgtcgggtgctcatgatgatcggggaaaccaggcgccgttcgttcaatatgttgtagaccacgtccgggcgcttcaggctgtgcaggcagtgaggaaccaacgcgatgccttcaccagcggctaccagccccaatgcgacctgcagttcccgcacctccatgatttttctggggactaacacacgatcgcgaaaggtcgccagcacctgatcggcaaagcttgggcgcggcgtttgcgggtaaacgatcagcgtttccgcctgtagggcgcgcagcgttaatccctccgaacgagccagcgggtgatcggccgctaaggccgccatcagaggctcttctcgcaggataatgcggcgtatatgcatgtcttcatggcgaatgcgaccgaatcctacatcaattttcccttccttgagcgctcgaatctgttccagagtggtcatttcatgcaggttcagacctacttcggggtgagcggtgcggaaacggcgaatcagctgcggcaggatgtcatagagcgttgaggcgacaaaaccgagcgacagcgggcgctctacttgccccacgcgctgggtcatggtcttcaattcgagactttgcgccaggaattgcagtgcgtgcccatagagaaagcgcccggccgcggtcagcaccagaggacgggcgccgcgtttaaacagcctcacccccaggctcgcctccaactgctgaatttgccggctgagcggcggttggctgatatgcagccgctcagccgctcggctgaaattctgctcttccgcgacggcgataaaatagcgtaaatgacgcagctccaagattatgcctttaaggtatcaatacgatgcaaaatgggtgttagacgagcgcgcccatgagcgatatcgtcgcgaatgaaaataaaatatgtattggccactcatcataggtggtttttaatttttattaaagaataagttttttagctaaatccaactcgtctatataagtgaaatacataagctcaacctattattggtggtttgctctgatatttatggttggtgccgatttcatttccgggaggacatatgtcgcaagctaatatttatgtcgtggatatcaatccaataatagataatgcgaaactgaataatatgcaccgactcacggtgttatggtgcgcttttattattgtttttgacggtttcgatcttgcagtactgggtgtggtccttcctgaactcatggcgaactggggcatcactgcggctcaggcgggcctgcagggcagttataccttagtaggcatgatgctcggcgcgattttattgggtccgctctcagataaaataggcaggaagaaaaccattagtttgtgtattatcacctttagcttatttacttttctttgcggctttagcgttaatgctggccaattcggctggtgtcgttttatcgccggcatggggctgggaggcgttatgcccagcgttacggccctcaccagcgaatattcacctaaaagtaagcggagcctgatggttgggctgatgtttagtggttattccatcggcggcatgctcgcggcgctgtcaggcatttatttgatcccggtcgcggggtggcaatctatattttatattgccgctttgccactcattgttttgccatggatgttaagccacctgcccgaatcggcggcatttttagtgaaaaccgaacagcatgaccgtttaaaacgccttttggaaaagattgcgccagactatatccatcaacccggtacgaagtttatcagctcttcctcggcaggtataaaagcgggaaaggcgaccctgaaggatctgttcgctgaacgcagaggcttaagtacgttgatgttctggctggttttcttcatgtcgctgtttgtcatctacggcatgacctcctggttgcctaagttgatgttgcaggctggctatccattaggctccagcctgtcgttcctgtttgcgctgcatctgggcaccattgtcggggcgttgagcagttgctggctgatggaccgaatgaatggaagacgtattcttattgggtattttttgctgggcgccgccactttagtgttgttgggtactcagacgccggtgtacatcctgtatttgctgctgattattgcaggtgcaagcaccattggtacgcaaatcgcgatgagttcttatgtcgcccgtttttatcctggaaccatgacttcgacgggccttggctggggcctgggcattggccgtattggcgcgattctggggcccttcatggggggtctgttgattgatagtgaattgacgcttcagcaaaactttatggctttcgcgctgccgtcgctgctggcagccgtctgcctgcttttcgtcaatccgcgcctggccgtttcctgaacttcactcttccttggcgtagagatacaccgaagcgcgggaaacgccgaggtgctgcgccacaatctccatcgcctttttcacctcgagcaggccttgctccctcagttcctgaatcaaccgctttctctccggcgttttcagcgcgcgcggcgtggtggcgtggcgtgcggcgaagcgatcgatacggttgcggatggcctccgcgccgctgggctccaggtgttccgtcaccgcgccggccgccgtttgcgtgaactgcgccagcgcgttttgcatgccgcggaacagcgtcatatcaacgttcaaacagagtgcggcgacgtagtcgccctgcgcattcttgatgccgatcgaggtgcttttcgccgggcggccatcggcgaactggttgccgtagttggcgatcacgctgggaaactccgccgaagcgatgcgagccaggccaagttccgtcgccgcttggccgacttctcgtccggacaggttgttgtggatcgccaaaatggcgtgttcgggattttgcagatcgtgaaccaccacctcgcaaaacggcgcgaaggtggcgctcagcccctcggcaatcacattcaactgggataacaacaggttttccggcacttcaggcatagggcactccgatcactttcttggcggcgttggctcatttcgagccagatgaagaacataccacaagtgcggcgcacggcggttttcatctggcgcctggcggcactaaaaatgatcttgctcccaattctgcacttcccgattggcatttggccgtcgcgcaggtatataacatcatttctggacttattttctaattttagattatttgttttaaatatgacaatgttcgtgcgttaaaagccgtatcgcacacaccggggtttttcagcgctagcttcaacggcccgcaagggcatggagaacaataatgtctgcaacttcagtcgtcggttctgcacgaaaacctttttattacacgttgacctttcagttggtggtagggctggcggccggtagcgcgctgggcctgttgtggccgcaaatcggcgctcagctcaatccgctggcggcggccttcgtcaaactgatcaaaatggtggccggcctgattgtgtttctcaccgtggtagccggttttgcgcaggttaaacgcggtgccggcgttggccgcctgggcatgatctcggtctgttatttcgaagtggtcagcacgttggcgctgctgatcggcctggcgatgggcaatctgtttgagccgggcaaggggctggtcttgcatgccgatgccgccacggcgcttaaaccggcggagcccctgcaaggcatggatttcgtgatgagcatcatcccgaaaacggtggttgatgcgttggccggcggcatcatgctgcaaatcttgttggtggctctgctgtttggctatgcgctgtacgcgatgggcgataaaagcaagccggtggttgatttggtgaatctgctgaccgacgccaccttcaaagtggtcaatatcatcctcaagctggcgcccgttggcgtatttggcgcggcggcgttcatgctgggcaaatacggcatcggcgcgctgatgccggtgatgaaattggtggggctggtctatctggggtgtctgttcctcattgtggtggtgttttccgtggtggcctggttgacccgttttagcctgttcagtttcttaaaactcatcagggaagagctgatcatcgcctttaccaccacctcatcggaagccgccttgcctggcctgatgaaaaaacttgaatcggtcggctgcagtaaagccaccgtcggttttgtcgtgccgaccggctactccttgaatctggacggctcttcaatctacatgacgttagcggcgctgtttatcgctcaggccgccggtttggagctgagcctggcgcaacaggccggtctattgatggtgtttctgttgacctcgaaaggcgtagccggcgtgacgggcggcgctttcgtcacgctgtccgcttcgctgttgatgtttccagagataccgatggaggggctggcgctgattctcggcgtggatcgcttgatggataccatgcgtacgttgaccaacgtggccggcaacggcgtggcgaccatggcgatttcttactggcagaaagagcgtgtgggttttcaggcgaggctgcctgaagcggctgcgcgcaaacccgtctgaatgccgccctgcgccgtttccgcagggcttttcgaacctgtgcaaggattaaatatgaagcatgatgtggtttacaacgccgccggcggctttcctcccgccggtcattattcgcccagctgtacggccaatgggacggtctatatctctggtcaattgccgatcgccttttccggtgagagtcttgccgacgaacctttcgcgcggcaagcccgccaggtgctggccaatctggatgcctgcctggcaggggccggcgtcggccgcgcgcagctggttcaggtgcgcgtctatctgacggatatcgatttgtggccgaccttcaatgcgctgtatgccgaatggatcggcgagtttcgccctgcgcgcgcggtggccggcgtatcgcaactgcattatggcgccgccgtggaagtggaagctgtcgcgttggccgccctttaacccttactgacaggtaacgctatgaccgatttgattttacccgtttatgacgacgtggccgccgccgccgcgcgcatcaatgattatactcaccgcacgccggtgcagacttcacgcacggttgacgacgatttcggcgccagcatatttttcaaatgcgagaacctgcagcgcatgggcgcctttaaatttcgcggtgcgatgaatgctttgctgcagttttctccggcgcagcgcaaggccggggtcgtggccttttcttccggcaatcatgcgcaggcgatcgcgctggctgcccggctgctcgacattcccgccacgatcgtcatgccgcacgacgcgccggcggccaaagtggctgcgacgcgcggctatggcggcaaagtggtggagtacaaccgttatcatgaagatcgcgagcagatcggccgggatctggcgcagcaacagggattaacgctgatcccgccttacgatcatccgcaggtgatcgccgggcagggcaccgcagctaaagagctgttcgacgaggttggcgaactggacgcgctgttcgtttgtctgggcggcggcgggttgctggccggttctgcgcttgccgggcgccggctgtcgccgggttgccgagtctatggcgtagagcctttggcgggcaatgacgggcagcaatcattccgtaccggccgcatcgttcacattgagacgccgcagaccctcgccgatggcgcgcagacgcagcacctgggccaatatactttccctattatccgccgggacgttgacgacattctgacggtgaccgacgatgagctgattagcgccatgcgctttttcgccgaacgaatgaaaatggtggtggagccaaccggctgcctgggattcgccgccgcctgcgcgcataaatcgatgctgcggggaaaacgcgtcggtgtgatcatcagcggtggcaacgtcgacattcgccgctacggcgagttgctggcaggtcaatagaaacaggcgggtgacgagagagaaccatggtgacagacaagacagtatttgagcaggtcatggcgctgctgagcgccggagaggccgcattccgggtgatagaacatccggcggaggggcgctgcgaagcggtggcggcgctgcgcggcaccgaacaggggcagggcgccaaggcactggtctgccaaacgcgcatcgacggcgccaagcattacattttggcggtgctggcggcggaccgtcaggcggatctgcagcggttggcggccgagttgggcggtaaaaaggcatcgttggtcagcccggcggaaatcacgaccctgacggcctgcgtgccgggggcgatcccgccgttcagcttccacccgcagctcaggctggtcgccgatccggagctgtttgaccgttacgatgaaattgcgtttaacgccggcgatctgcaacgctccgtggtgctcaatgcgcaggattatctgcgtattgcggcgcctgagtttattcattttgcgcgtacggagacaatgacggagtgagaaaaagatcgtctgttcggacgagttgaacaacaacgctgaaccgccgtttaccgccggttcagcgttgttatgctatatcctttgttcggaaccgctggctgaacgagagactgagtttgatcaccaatcccctatcccgcaaagaatacgcagtatggatgtcgttaacgatagggttcagctttgcgtggctaaatcttttagagatttataatcgtgatacgttattttttcagaagttgacgatttccgtcatcaataacgtatcgttcgccgatgtcatcgccccttacctgaggctgattctgtatcttcctttcggcgtgttggcgatcgtgctgacgctgctgttttgcgcccagcggttatgcgatacccggttcttcgtgctcgcctggccggtttctctggcgatcttcctggccttttggtttatcaacgtcgctttccccgggcatctcaatctggtattagccgccaaatcctgtgtgctggcgctgattgggctgatcccaccgaggaagcggaagaccgaataatcgaacgcagttcgatggagagtccgtatcccagaaagcgaaaaacccgccataggcgggttcttctgaatatggtgcccggactcggacaaccggcgctggcgccgcgttgaacagcgcttcagcgctggcccgcagggtgaggcctctggccgaataatcgaacgcagttcgatggagagtccgtaccccagaaagcgaaaaacccagccataggctgggttctctaaatatggtgcccggactcggaatcgaaccaaggacacggggattttcaatcccctgctctaccgactgagctatccgggcaacgggcagcattaaaccgtattggccgaaagccgtcaacggctttatgcgtgaaatacgcgaaaatgcctccggttgctggcttttcaggcaaagggcgcaaaaaatgcgcctgttggggctatcgcctcgggttggtggcgctgccaaccctgccggttcagctcaacgccccgttgcggcggcactgcgccacctgcaagatgtcttccgccagccgtttggcgaccgatacgtcctggagctggcgttttaccagcagtttgctcaggcagccttcctgaatcagctccatttgctgcgccaccatgtcggcgtcgtcggcatccatgtcgcgcagcagttcgcgggtcagctccagcgaggtcagcttttgctgctccgccagctggtggatcgggtggtccgtttccgggaagaagctgcaggcggcgataaacaggcagccgggatagcggtcttgctgcacgtattccgccagcacgtcatagcgcgccagcagcttttgctgcgggctcagattttcgtccagcagcagctggcggcgccaggtgtcgatctgttggccgtggtagcgcaggcagtcgtacagcagcgcttcgcgatccggccagaaccgtttgagatcgccgggctgaacgtcgagtttttccgccagcatctctaatgtggcggtcgccaggccctgttgttccaacaggcccagcgcggtatcaaggacgtgttcacgttgcacttgtgcttcctcccattcacttccgatcttcagtgtcagttatcgcatcactttctgcaaatgcgcgttgaaggcttccgccttcataaaaccggtgacccgctgcgccgtcagttcctggcccgccggatcgaagaacaggatcgtcggcagccccagcacctgcagatgcttcagcagcgccgcctgttccgcgctgttggcggtcacatccgcctgcagcagcaccgcgttggccaggctcgcctgcaccgccgcatcgctgaaggtgtatttctcgaattctttacaggctacgcaccagtcggcgtacagatccagcatcaccggcttgccgcgcgcctgttgcagcgccagatcgagctgtgcgacgttgttgatgcgggtaaaggccaggtgtggctgagcggcctgctgcgcctggtcggcgccgaaagcccagtcctgcagcggccgtgcggcgatcaccgccgccgccagcagcagcagttgcagggcgcgagcccagccgcgcgcgcttctcaggctcagggcgaaggcccaaccgaagaacgccaggccgagcaggctccacaggcgcatgccccacagatcgccgatcactcgctccagcaggaacaccggcagcgccagaatgacgaagccgaaggcctctttcacgtactgcatccacgggccgctgcgcggcagcaggcggttgccgaacagggtgacgatcaccagcggaatgcccatccccagcgcgtacaggtatagcgtgccgccgccggcccacagattgccgctctgggcgatatacagcaggatggcgctgagcggcgcggtggtgcagggcgagcaaatcagcccggccagggcgcccatcaggaacacgccggtcagcgagccgccgcgctgggtgttgctccagttagccagccgggtttgcagtgcggaaggcagctgcagggaatagaggccgaacatcgacagcgccagggcgatgaacagcaccgacaggccgatcaagacataaggatgctgcagcgccgcctggaactgcagcccggcggcggccaccaccaacccgagcagggtgtaggtgagcgccatgccctgcacgtaaaccaccgccagcgccagaatgcggccgctgctttgcggccggtcacggccgagaatgatgccggagatcagcgggtacatcggcagcacgcacggcgtgaaggcgatgccgatgccgatcagcaatgcccacagcggcgagaacggcaggctggccggtgttgcggattgttcggctggctcagaggcagccgccgggagcggcgcggcagcgccggcgctgaccgcgtccagcgggatgacccgggtttccggcggatagcagaagccggcctcggcgcagccctgataggtgacgctgaggctggcgttggccgccgcctgttgcagcggcacctgcagattcagctgctgtttgaaaatcgccacttcgccgaagaactcgtccttgtggcttagcccttcgggcagggtaaacgcgccgagcgttgcctgctggggcaccagtttgatctgctgacgatacaggtaatagccggggcggatctgccagttcagcgttacctggttgccttgctgtttgaaatcgaaagcgaaggcccgatcgacgggcacgaactggctgccgcccgtcggtgcgaacagtgaagcctgcgccgcctgcggcaggaagaacaggctgcacagcagcaaaatcagtttaatgaagcgttgatccatgacaggtagtctttatctccggccatcaccggcaataccagcagctcgggtgtctggtaggggtgatgttgtttcagggtgtcgagcagggcctgctgacggcggcgatcgcttttgaacagcatctgcacctcgtattcctgttccagtttcccttcccagtaatacagcgaggtggcgccgggcagcagcgtggcgcaggccgccagcttatcgcccaagacccgcgccgccagttcctgggcgctggcttcatcgggtgcggtacagagtatgacgacagcttcgcaatcagacatcttcagccctctcatcggttcgaatgggcactataccctgaaggcggattggctagaaggcgagtttatcgccagaaggaaaaccggggccgaagccccggtcgaagcgttacagcatgacgctgccgagcaggaagccgaataccaccgcgaagatcacgcccatggtgccgggaatgaagaacggatggttgaacacgaagcggccgatgcgcgtggtgccggtatcgtccatctgcaccgcggcgaccagcgtcgggtaggtcggcaggatgaacaggccggaaacggcggcgaaggaggcgacggcggtcagcggcgacacgttcagcgccagcgccatcggcatcagcgccttggcggtggcggcctgcgagtacagcagcgccgagcagaagaagaagatcaccgccagcagccacgggtgcgcctgaatgacgctgccggccgtctctttgatccaatcgatgttggcctgcacgaaggtgtcgcccagccaggcgacgccgaggatacagatacaggcgctcatgccggccttgaaggtgctggagttcagcaccatgtcggtgtcgacgcggcacagcagggtggtcagcgtggcgacgctcagcatgatgatcaggatggcgttggtggtgttcatcagcggcttggccaccaggcccaggcccgggctgttgatgatggcgtaggcgaccacgcacagcacgcccagcaggaacagcagcaccgaggctttggcgcgcggtttgatcgccagcgcgttgttgccgcgcagggtgatcaggccttcttccaggcgtttcaggtagaccggatcgttagacagcttggagtcgaacagccaggtcaccagcagcgacatcaccagcacggcgcagaaggtggacgggatcaccaccatcagcaggtgcaggtagctgacgccgtggccttccatcaccgaagacatgtacaccaccgcggcggaaatcggcgaggcggtgatggcgatctgggcggagaccacggcggtcgacagcggccggcaaggcttgatgccctgttctttcgccacttcggcgatcactggcagcgccgagagcgagatgttgccggtgccggcgaagatggtcaggaagtaggtgacgataggggcgagaatggtgatatgtttggggttcttgcgcagcagcttttcggtctgctgcaccaggtagtccatccccccggcgacctgcatggcggagatcgccgcgatcaccgccatgatgatggaaatcacgtcgaaagggatgctgcccggcttgacgccgatcagcgccaggaccagaacgcccaacccccccgcgaacccgataccgataccgcccaacctggcccctaaaaagatggccagcagaacgataaccaattccaaggctagcatagtgtttactccttaaaatgagatttcccgtcatccttgaaactgcatcggtgttggctgcgagcactcaccccagtcacttacttgagtaagctcctggggacttgcgctcttgccgccttgatgcagtcccaatgatttagggtgtaaattgaaaataaaacgttaaaattttgtgggcgcctaaaagtaaaaaggcacgctatccagaggatttagcgtgcctttcagggctaccgggtaggtctgttattgttcattttcatccgtatagcgtttggctttataggccgggtgcatcaggttctccacggagaagatgtcatccagctcggcttcggtcagcaggccgcgttccagcaccacttcgcgcacgctcttgccggtttcggcgcagatcttcccgacgatgtcaccgttatggtggccgatgaacgggttcagataggtgacgataccgatcgagttgaagacgtagtgttcgcagacttctttattcgcggtgatgccgttaatgcatttttccagcaggttgtagcaggcgttggtcaggatgtggatcgactcgaacatcgcctggccgatcaccggctccatcacgttcaactgcagctggcccgcttcggccgccatggtaacgcaagtgtcgttgccaatcaccttgaaacacacctgattgaccacttccggcaccaccgggttcactttggccggcatgatggacgatcccgcttgcagctccggcaggttgatttcgttcaggccggcgcgcgggccggaggagagcaggcgcaggtcgttacagattttggacagtttcaccgccaggcgtttgagcgcgctgtgcaccatcacgtaggcgccgcagtcggaggtggcttcgatcaggtcttccgccggcaccaccggcaggccgctgacttccgccagtttttgcaccgccagcggctggtagccttccggggtgttgagcgcggtgccgatggcggtggcgcccaggttcacttccagcagcagctccgcggtgcggtgcaggttgcgggtctcttcgttcagcagcacgctgaaggcgtggaattcctggccgagggtcatcggcaccgcgtcctgcagctgggtgcggcccattttcaggatggtttcgaactctttcgccttgcgatcgaagccttcgcgcagctggttgatggcgtcgatcagtttctggttggaggcgtacaccgcgatgcggaacccggtcgggtaggcgtcgttggtggactgacacttattgaggtgatcgttcgggttcaggtactggtattcgcctttttggtggcccatcagctccaggccaatgttcgccagcacttcgttggtgttcatgttcagcgaggtgcccgcgccgccctggaatacgtccaccgggaactgatccatgcacttgcctttatccagcacctcgtcgcaggcctggatgatcacgtcggcgattttgcgcggaatggttttgagttctttgttggccatcgccgcggcctttttcaccatcaccatgccgcgaacgaactcgggaacatcgctgattttgctgttgctgatgtagaagttttcaatcgcacgcagagtgtgaactccgtagtaagcgtctgcggggacttcacgtgttcctaacaggtcttcttcgatacgaatgttgtttgacatgagaaccttctctatgtgttgctgccgaattaataatttgtcaggtcaaggctaaagggcacagcctaaattaatattgccgaaggcttggggcgtgaaacgattaaccaaatcgcccgttgctgcccagatcatatgctggttgataagaaatgactgaatccagatcaccttatggtgtttaaggatatgcccttttccggttctgtgacttctttcacgtttgtgaactttagcaataaaaaccggctctcggttgaaatggtggggggatgccctcattgtaatggtgtcggccgtttacggcctcttttttcgcgccgtcgccccgtggcggccgcgctttacctaccgataggagaaccaggtgcgctggttaccgctactgctgatatttctgctggcttacatagaaatatccatctttatcaaagtcgccgccgtgctcggcgtggctgtcaccctgttgctggtggtgttcagctcctgcgtcggcatttcgctggtgcgcaatcagggcatgaaaaccttcgtgcagatgcagcaaaaactggcggccggcgaaagcccggcggcggaaatggtgaaaagcgtttcgctggtgctggcgggcttcctgctgctgattccgggcttcttcaccgacttcctcggcctgctgctgctgctgccgccggtgcaaaaatcgctgacgctgaagctgatgccgcatctgtcggtgtatcgccccggcggttggacgggcggcgacgccgccaacggcaacacctttgacggcgaattccagcgtaaggacgacgagcgcccggtgctggaacaccgcccggacgaggatcgcaaacctcacgatcgttaagcaaacgcggcccaggccgcgtttttcatctctgcggcactcgccgaaccaaaaatgcgaaattttttttcgttagcccccttgaagggggctggaacgcccccatctcaaatgccacgaggccggtaataacaaccatccggtgtacaaccctaaatctgatagagaccttcttacaggagagcgttcaatgagtattcgtccattgcatgaccgcgttatcgtcaagcgcaaagaagttgaatcaaaatctgctggcggcatcgtcctgactggctctgctgcgggtaaatccactcgcggtgaagtggttgcagtgggtaaagggcgtgtgctggaaaacggcaacatccaaccgctggatgtgaaagttggcgatatcgtgattttcaacgacggctacggcgtgaaagcagagaagatcgacaatgaagaagtgttgatcatgtccgaaagcgacattctggcaattgttgaagcgtaattgcgctttatcttctgaactgaacgagttgaagggaaataccaatggcagctaaagacgtaaaattcggcaatgacgctcgcgtgaaaatgctccgcggcgtgaatgttctcgctgatgcagtaaaagtgaccctgggcccgaaaggccgcaacgtagtgctggataaatctttcggcgcaccgaccatcaccaaagacggcgtttccgttgcgcgtgaaatcgagctggaagacaagttcgagaacatgggcgcacagatggtgaaagaagtggcctccaaagcgaacgacgcggcgggcgacggcaccaccacggcaaccgtactggctcaatccatcatcaccgaaggcctgaaagcggttgctgccggcatgaacccgatggatctgaagcgcggcatcgacaaagcggttgtcgctgcggttgaagaactgaaaaaactgtccgtaccttgctccgattccaaagctatcgctcaggtaggcaccatctccgccaactccgacgaaaccgtgggtaaactgatcgcggaagcgatggagaaagtgggcaaagaaggcgttatcaccgttgaagaaggcaccggcctgcaagacgagctggacgtggttgaaggtatgcagttcgaccgcggttacctgtccccatacttcatcaacaagccggaaaccggttctgttgagctggaaagcccgttcatcctgctggctgacaagaagatctccaacatccgcgaaatgctgccggtgctggaagccgttgccaaagcaggcaaaccgctgctgatcatcgctgaagacgttgaaggtgaagcgctggcgaccctggtggtcaacaccatgcgcggcatcgtgaaagtggctgccgttaaggcgcctggcttcggcgaccgtcgtaaagccatgctgcaggacatcgcgaccctgactgccggtaccgttatctctgaagagatcggtctggagctggaaaaagccaccctggaagacctgggtcaggcgaaacgcgttgtcatcaacaaagacaccaccatcatcatcgatggcgtgggcgacgaagcgaccatccagggccgcgttgctcagatccgtcagcagatcgaagaagcgacctctgactacgatcgtgaaaaactgcaggagcgcgtagcgaaactggccggcggcgttgccgttatcaaggttggcgcagcgactgaagttgaaatgaaagagaagaaagcccgcgttgaagacgccctgcacgcaacccgcgctgcagtggaagaaggcgtggttgccggcggcggcgtcgcgctgatccgcgttgcaggcaaaatcgccgcgctgaaaggcgacaacgaagaccagaacgtgggtatcaaagttgcgctgcgcgcaatggaagcccctctgcgtcagatcgtggttaacgccggtgaagaagcttccgttatcgccaaccaggtgaaagcgggcgaaggcagctacggctacaacgcttactctgaagaatacggcgacatgatcgcgatgggtatcctggatccaaccaaagtgacccgttctgctctgcagtacgcggcttccgtggctggcctgatgatcaccaccgaatgcatggtcaccgacctgccgaaggctgacgcaccggatctgggcgcagcaggcggcatgggcggcatgggcggtatgggcggcatgatgtaatcatccccccacacgcttgtgtgctgagaaccccggtcaaacgaccggggttttttttagcttaaaaatcaataaaaagaatgttttattagcttgttattagtttaatgaatgaataattgcattattttgtttttgccctaaaccgttgtcgtttcgtaccgatatagcccctaccgggcggggaattttcccccgccggggtgactgtcaacggagacgacttatgctgaaaaatatgaaaatagccacctggctgatgttgatgctgttgctgctgggcttgatgcccatgggaaccggcgccatcgccttctatttcatgcagcaaaacggcaacagcatcggcagaatgagcactttctccgacgaggaagcggcgctgaaccgcagctggcgtgctttgctgcaaacgcagacgctgatcgacaacatggcgttcgagcgtatggcgcagaccagcagagccgatattcagcagggcattgatgaggcgcgcggcgagctgcgcggcgccgatgtcgctttcaatctgttctgggatacgccgggcctgacggtatcgcgcccggagctgggtgaggcgatgaaaaaggtctacctggcgcagcagagagtgctgaagcaagagttgacgctgctggccgagacgccgcaggcatcgttgattgaacggctgcacgccatggcggccgagaagcgtcagatgcgccaacggttggacggccagtttgccgactacatgcgggccaccgtggccgcccaccgtctggcggtggaggaggcggaacagactcagaaagtgttcgcccgcctgctgagcggcaccctggcggcgatcctgctgctgctgctcgccgtacagcgtgatttccgccggcgcctgatcctgccgctgcgccagattgccgaacatttgcaaaaggttgggcgtggcgatctgcgtagcaagatcgtggcgcgcagcaacgatgagattggcatgctgttcgccagcctgcaggcgatgcagcaggagctgagcgccaccgtgcagcaggtgcgtgacggcgtggagtcgatcaaccacggcacgcatgagatcgccgtcggcaacgccgatctctccagccgcacagaagaacaggccagcgcgctgacggaaaccgccgccagcatggaacagatcaccgctacggtgcggcaaaacgccgataacgccaaccaggccgccgggatggtcaatcagaccgccggcattgcccgcaacggcgaaacgctgatggccagcgcggtcgacaagatgcgggcgatcaacgacagcgcgcgtcaggtgggggatattaccagcgtgatcgacggcatcgccttccagaccaacattctggcgctgaacgccgccgtcgaggccgcgcgcgccggggagcaggggcggggttttgcggtggtggccggcgaagtgcgcaatctggcgcagcgctgcgcgacttctgccaaggagatcagcagcctggtcgacggcgtcaccggcgatatcgccgccggcgtgcggctggtggaacaggcgggcgagacgatgaatgccatcgtcggctcggtgaaccaggtgacgtcgctgatggataacatctcgtacgcgtcgcaagagcaaagcaagggcgttgagcaggtcggggtggcggtgacccagatggatcaggtaacccagcagaatgccgcgctggtggaagaggtggcgaccaccgccgtcggcgtggaggagcaggcggccctgctggcgcaggcggtggcggtattccaactggcgggagagccggaagcgtcggcttcggcggccggtgccggctgggtataatgccgccgctctgtatttgatgatatttttgccgcccggggcgatttagctggtaaactggttagtcatcagctgtcgctcaagacgttggcccgctcgcgcggcaacggatgcttaagagatggcatcgctttctgatataccctatgaatttcaagttgtagctaggcggccagctcgtgagtccccaggcgcttacttgagtaagtaactggggggagcgagtgcagtcaacaacgctacagcttgaaaggcgacgggtagaagattttgcgtaattctcaacatcgaatggggaacaagatgcggattaaagccttactgggtctttcggcagcggtgctgctggcgggttgcagcaccactcatgaactgaccgctgcgggtcagcagatcaagttcaccgacagcaagccggcggcggaatgccagctgctgggggaagtgaccggcacccagagcaactggctgtccggcaacggcggtgagggcagctccatgcgcggtgcggccaacgatctgcgcaacaaggcggcggcaatgggcggcaacgtgatctacggcgccaacagcccaagccagaacctgctctccagcttcgcgccgctggacagcaaaatggtcggccaggtttacaagtgcccgtaaggcgctgaggccaaacgccgcacagagataaaaaaagaggaatgccacggcattcctcttttcgttccatcaggccatgtggcgcgcatcactcctgcatcaggcgcaggtcgatcggtgttttgctcggttcgccgcccacttcacgcgtcaggcgcggcaccagataaccggacaccttgctcagcagcgcctgcatgatgacgcgcgcttcatcgtcgctgaccatgaagtgcgccgcgccctgcaccttgtccagcacgtgaatgtagtagggcaggatgccggcgtcgaacagcgcgttgctgagcgcggccagcgtgtcggcgtcatcgttgacgtcgcgcagcagcacgctttgattgagcagcgtgacgccggcgaggcgcagctgagccatggcgctctgcagctcgcggtcgatttcgttggcgtggttgatatgcgtgaccatcagcacctgcaggcgcgaggccgacagcaggcggcacagcgccggcgtaatgcgcgccgggatcaccaccggcagacgggtgtgaatgcgcaggcgtttcaggtgcgggatggtctccagttcgccgaccagccactccagctcgctgtctttggccatcagcggatcgccgccggaaaaaatgatctcgtcgagttccgggtgttggcggatataatccagcgcctgccgccagttgttcttgttgccctgattatcctgataggggaagtggcggcggaagcagtaacggcagttgaccgcacagccgcctttgaccagcagcagcgcgcgattgcggtatttgtgcagcaggcccggcaccacgctgcgctgctcatcgagcggatcggtggtgaaccctggggcgttgatgaactcctctctggcggtcagcacctggcgcagcagcgggtcgttggcgtccccggggcgcatgcgcgcagcgaaggcgcgcggcacgcgcagggcaaacagccggcgggcatcgcgcccctgcggcagttccgggtgcgtattcagtgacaaaagctgcagtaattcatcgggatcggtaataacatcggcgagttgatgcaaccaatcttctctatgtgccgtactttgggttataatgtgtgccatttttttggctaagctaccagttcaaatattcagagggccatcatggcgacttattctagcaacgatttccgtccgggtcttaaaatcatgttcgagggcgaaccttacgccgtcgaagccagtgagttcgttaagccgggcaaaggccaggcgtttgcacgcgtgaaaatgcgccgtctgctgaccggcacccgcgtggaaaaaaccttcaagtctaccgattcttgcgaaggcgcagacgtgatggacaccaacatgaactacctgtacagcgacggtgagttctaccacttcatgcaccctgagtctttcgaacagcatcaggttgacggcaaaaccgtcggcgacgcggccaaatggctgcaggataacgcagagtgcatcatcaccctgtgggatggccgtccaatcgccgttcagccgccgaactttatcgaagcggaaatcaccgataccgatcctggcctgaaaggcgataccgcagggactggcggcaagccggcgaccctgagcaccggcgccgtggtaaaagtgccgttgttcgtccagatcggcgaagtgatcaaagttgacactcgctctggcgaatacgtctctcgcgttaagtaagtttcaaaacagaggaacccccgcggttcctctgttttatcccatcctcgttcgttggcagaaaatccgcatgttcaagaaaacgctgttggccgtgctctccctgttgttccttttctccctcagcagttgcaatacgtttcgcggtttcggcgaagacgttcagcatctcggcggcgccatctcccgcacggccagctgatcccgcctttaacccgatgtatttgcgccacaaagccggtcacgatcccacaccctccgtcaattttgactacgcttagaaagccgtactttttcatcaacgacaaataaggactttcttatgctgaagaaaagtattatcgcgatcttctctttgatgattttgagctcgctgaccgcctgcaataccacccgcggtgtgggtgaagacattcaggccggcggcaaggctattcagcgcagcgcggaataatccgcattccacccggcggcgttccggctgcggagagccgccacatttctatcccttgcctgagcgttaacgctgctgctatcctgccgcagtgcgggtgaggttacccgtcatgcatcacctcgctgaacgggacggctcgtttacgcgtcattttatcggggacgaccccagtggtagggaggccgtctcatggcctggattattctgcttatcgccggtttgctcgaagtggtttgggctatcggtctgaaatacacccacggttttacccggctgacgccgagcatcatcaccatcgccgcgatggtggtcagcatgttgctgttggccaacgccatgaaaacgctgcccgccggcaccgcctacgcggtgtggaccggcatcggcgcggtgggcgcggccatcatgggcatggtgctgttgggggaatcgaccaatatcgcgcgcatcatcagcctgtgcctgatcgtggtcggcatcctcgggctgaagttcagcagtcactgaccggcggactgctgcacccagatcagcttgtcggtggcgaaaccgtagcctttggctgtctgcaataagcggtcgcgcacggcggcgtcaagcgtcggcgtgcgcgacaggatccacagatagtcgcggttcgggccgcaaaccagcgcgtagcgatacgccggatccagggcaatcacgttgtagccgccgtagaaggggccgaagaacgatactttcagcgccgcgatctgcggtgaaccgataaagtaggctttgccttcgctttcttgccattgctgtttctgcggattgaagccgcgattgatgactttcagtccgccgtcggcacgcgggctgtagtgggcggtcacctgctgtaaaccgcgttcgaagcgatgatccagacgtgcaatctcataccaggtgccgagatagcgctggctgtcgaaaggggtcacgaccttgatgtctttaggcggggagacgctgcaggcgacggaaagcagggcggaaagcatgacgctaagctttgaccataaacgcatcggtgactcctgtttaccgggggcgagtagacagtgtagccgatgagaaaagggcggccaacgggcgttggccgcctgagcggtttacagcgtgacgacgccgatgacggtgacgacgctaaggatcgccgccagaccgtagaacacccacttgccggccggcacgtggatcttcagatcgtgcatcgcatggtggatgcggtgcaggccgcaccacagcggcagaatgatcatcattagcaggaacaggcggccgatcaggctctggcagaacgccagcacgcgctcgtaacccagcgcctcaccggggaacagccccagcggcagcagaatgccgaccagcagcacgatggccggtgcgacgatcgcgccccacatgccgccggcgccgaacaatccccagaaaaccggctcgtcggaacgtttaggtgcttgatttatcatgtttcctccggattagatcagggccacggccaggatgaccacgctgacgacgatggtgacggcccacagccctttcacgatggggcccggccccattttctcgctgttgaccacgatattggcggccttcggcgccagatcgaaccaggttttggtgtgcagcgccgccgccagcagggcgacgacgttgatcaacagcaccagcggattctgcaagaaactgacgaagccggcccagctctcggcgccgcccttcagcgcgaacacgccgtacagcagcacgatgctgaaccacaccgccagcaccgaggtgccttcgcgcagcatgtagaaacggtagaagccgagcttttgccaccaggtgggcgtcatggtgcgcacatagggcttacgttgagttgtcatggcaatttttctcccttattgcggcttcagcatggcgatcatgaagtctttggcgctctccaccttgccctgctggatggcggcggcgggatcgacgtgtttcgggcagacttcagagcaatagccgacgaaggtgcagctccagacgccgttttggccgttgagctgcggcatgcgctgtttcttgccgtggtcgcggttgtccaggttatagcggtgcgccagcgtgatcgccgccgggccgataaactcggggttgaggccgaactgcgggcacgcggcgtagcacaggccgcagttgatgcagccggagaactggtggtacttggccatctgcgccggggtctgcacgttcgggccatcctccggtttgcgatcgttgccgatgatgtacggtttgatcgcctccaggctttcgatgaagtgggtcatgtccaccaccagatcgcgctcgatcgggaagttgcccagcgcttcgaccttcatgccgccgacgtagtcgcgcaggaaggttttgcacgccagcttcggcacgcggttgaccatcatgccgcaggagccgcagatcgccatgcggcacgaccagcggtaggagagatccggcgccaggttatccttgatgtagcccagcgcgtcgagcagcgaggtctgttcatcataaggcacggcgtaagtgacgaaatgcggctcggcgtcactttccgggttatagcgcatgacgtcgatcttcagggtttgcatctcagccatttgcctgctccttattctttttctcctgcgcttcggcttctgcgccgtagacgcgtttggccggcggcagcttggtgattttcacgtcgctgtattcgagacgcggtgcgccctgcgggttgtggaacgccagcgtatgcttgaggaagttgacgtcgtcacgctcggtgcagccttcgtccaggcgctggtgggcgccgcgcgactctttgcggttaaatgcggagtgcgccatgcattcggcgacgtccaggccgtagcccagctcgatggtgtacagcagatcggtattgaacacgctggtgttgtcggtgattttgacgcgcttgaagcgctctttcagctcggccagcttatcgatggttttttgcatcagctccggcgtgcggtagatgccgcagccttcttccatcgacagccccatttcgtcgcggatcttcgcccagttttcgttgccttcctgcttcatcaggttgcccaggcgggtttcgacgtcgcgggtttgcgcatccagcgcggcgccgttggccggcgcggtttccagcgcgcggcgcgccgcgtgctcaccggcgacgcggccgaataccaccagttccgccagcgagttggagccgagacggttggcgccgtgcaggccgacggaggaacattcgccgaccgcgaacagccccttgatgcgagtttcgcagttctggtcggtttcaatgccgcccatggtgtagtgcgcggtagggcgcaccgggatcggatccttcaccggatcgacgccgacgtaggctttggccagttcacagatgaacggcagccgctccagcagctttttctcgcccaggtggcgcagatcgaggtagaccacgtcgccgcgtggggtggcgatggtgcggccggcgcgccattcgtgccagaaggcctgggacactttatcgcgcgggcccagctccatgtatttgttcttcggctcgcccagcggggtttccgggcccatgccgtagtcttgcaggtagcggtagccgtctttgttcaccaggatgccgccttcgccgcggcagccctcggtcatcaggatgccggaaccgggcaggccggtcgggtgatactgcacgaactccatgtcgcgcagcggtacgccgtggtggaacgccatgcccatgccgtcgccggtgacgatgccgccgttggtgttgtagcggtaaacgcgcccggcgccgccggtggccatcaccaccgcgttggcgcggatctgcacgcgggtaccttccatcatgttgagcgccaccaggccgcgcgcctggccgtcatccaccaggatatccagtacgaagtgctcgtcgaagcgttgaatttgcgggtatttcagcgaggtctggaacagggtgtgcagcatgtggaagccggtcttgtcggcggcgaaccaggtgcgttcgatcttcatgccgccgaaacgccgcacgttgaccgaaccgtccggtttgcggctccacgggcagccccattgttcgagctgggtcatctcgcgcggacactgatgcacgaagtgatcgaccacgtcctgctcgcacagccagtcgccgccggcgacggtgtcgtggaagtggtagtcaaaggtatcgtgatcctgagtgacggcggcggagcccccctcggcggcgaccgtgtggctgcgcatcgggtagaccttagagatcagcgcgattttcagttggggattggcttccgctgcggctattgctgcacgtaaaccagcgcccccggccccaataatggcaagatcggcgttaaaggtttgcactgcattcctccaatgttcttgttaagaacggcaagttaaatatctatgcttaaaatttagcgaactcttcgggtgctaactaattgaaccgattaatgttgcttaaaggttaaggatagatatctcccaccaataatggggaattaactatacctaaagttaagtagtcgaaatttgatgtgatcgattgttttgtcgattaacgcttgcccaacaggcttgcctgccttttcgcgcgttcggcgtgctttaccctttttaacgcgcttttgccgcctatttatcggaaattggcgttatggccggttgcgcatcgtgaagaatttgtttggctgcaaggatgcgagtagactgcatcccctgtttgatttcggagttaattaccatgagcgaaacggcaagctggcagcctagtgcacccatcgccaatttgttgaaacgcgcagcgattctggctgagatccggcgtttcttcgccgatcgtggcgtgctggaagttgagacgcccaccatgagccaggcgacggtcaccgacgttcacctgttcccgttcgagacgcgtttcgtcgggccgggggcggcagagggcctgacgctatacatgatgaccagcccggaatatcacatgaagcgcctgctggcggcgggcagcggcccgatctaccaaatggggcgcagcttccgcaatgaagaggccgggcggcaccataaccccgaattcaccatgctggagtggtaccgtccgcactacgacatgtaccgcctgatgaatgaggtggacgatctgctgcaacaggtgctggactgcgagagcgcggagaccctgtcttatcagcaggcgttcctgcgccatctggacatcgatccgctgtcggcggagaagacgcagctgcgcgaagcggcggccaaactcgatctgagcaacatcgccgataccgaagaagatcgcgatacgctgctgcagctgctgttcaccgtgggcgtggaaccgcatatcggccgtgaaaagccggcgttcgtttaccacttcccggccagccaggcggcgttggcggagatcagcaccgaagaccaccgcgtggcggagcgttttgaggtgtacttcaagggcattgagctggcgaacggtttccgcgagctgaccgacggccgtgaacaacagcagcgcttcgagcaggacaaccgcaaacgcgcggagcgcggtctgccgcagcaaccgatcgactacaacctgttggcggcattgcagcacggcatgccggaatgttccggcgtagcgctgggcgtggatcgtctggtgatgctggcgctgggcgccgagagcctgagcgacgtattagccttcccggtcgggatcgcctgacgtttcaggcggtgagaaaagcaaaaagggtcggcatttgccgaccctttttttatcgcgagaagcgcttacagccccccggcgtcgcgcttggtgttcggcgccggcgtagacggcggcgtacggccgttgttggtcaaccgcgacagcgtctcggtgcgcacctggaacggcgggtacggcagcgtgatgccgtgctcgcgatagcccgccaggatcagctggtggatctcgtggcgcagcggcatgcggtggcccatctcggcggcgtaaatacgcatctcgaagatctggatgccctgttgcagatcgaccaggtaaacctccggcgccggattatccagcaccagcgagcagcgttcggcggcgttcatcaggattttggtcacctcctcgctgttggcttcgcccggcgccggtacggtcagcaccacacgggtcagggtgtccgacagcgaccagttgacgaactgttcggtgatgaacgctttgttcggcacgatgatctctttgcggtcccagtccgaaatggtggtggcgcgggtattgatcttggtgacggtgccggtcaggttgcggatcgtcacggtgtcgccgatgcggatcggtttctcgaacaggatgatcaggccggagatgaagttagagaagatctcctgcatgccgaagcccaaccccagactgagcgcggtaaccacccactgcagttttgaccattcgatgccgatccaggcgaagctgagcaccgcgccgaacagcagcagcaagtacttggtgatggtggtgatggcgtagccggtgcccggcgacagatccaagtgctgcagcaccgccagctccagcagcgccggcaggttgcgcaccagctgcatggtgatgatcagcaccagaatagcgatcagaaccgcgccgagggtgatcggatgggcggtctctacgccgttcaccgtcgaagtcacgtcccacagcgagatgttttccaggaaggcgaacgcggagtggatctcggaccacagcacgatcaccgacaccagcgcgatcagcgtcaggatcgaccgcaccagccgcagcgactgggcgctgatggtgtccagatcgaagtccgaatcgtccggatcgatggcgccttcggtgctgttcggggtgtgcgaggtttcgtcttcgccgcgggcgcgctgggccaggatgtcggcgcggcgctgtttggcgcgatcgaaggcgatgcgccgccgttggatcagcatccagcggcggatgatgtggtagatgaccagcaacaggaaccagatcgccaccgaggtctccaggcgcgccaacagcgcctgcgcggtggtgaggtaaccgacggtcgacgccagcgccgccagcagcggcgccgacagcagcagcccccagaaggcgctgttgagcatgttgtcgccggagccgtttttatccagatacagcggaatgccggcgcgtttcaggctgtgggtgaccagcgccagcgccagacacagcaggataaagcacagccgtcccagggtgttggcgaactcgcgttctttcaggctatcgaaggtgatcagcgccatgatcagcggcacgatcagccagatcgacatcttgtagtagcgcatggcgcgcgagacctgcttcgccggccagcggaagtgcacgatgaacagcccctgcgggtgggcgaaggcggcgcagatcatgcagatccacaggatcggcagcgtggcggtcacccctttgccgatcgcttctgccaccgggtagttccaggcgctctgcaggccgtaaccgagcgcggcccacagcaccggcagcggcatcgccaccagaatcgaccagaacacggtgcgcaccgtgaggaagaattcgtcctgcgtcaccttgccgacgcggctgctggcgcgctcgaggaaggcgtgatagtgcttgcgtgaactgatgctgaaaatcaccagcagcagggcgccgaagatcgggatcagcgtttcgcggctggtcaccatcatcatgaaggcgccgccgagctgcgacagcgtgtccaacgacaggacgcgcgtcagatcgtgcgccacgttgagcggataagagaagttgatcggattgacgtccggcacccagaacagatagcggtgggtggcgtcgcgaatttcgttcaacgcttcgatcagttgggtgttggccaccttcagcttggtcagctcgaggatttgggtgtcgcaaccggacagcagcgagttgagcagctcgcgctgggtgcgcagctgggcatcgacgatgcgctgctcctggctggtcagcgcgctgccgtcgtcgcgcttgaattcgcgctgcgacagcttttccaactgattttcaaactgcaggcgctgcacgcgcagctgggccatgtcgccgtccagctgttgcggcttgggcatttccggcagcgtcgccacttgggcgcgcagggtttcccccagcgccgacgacgagccgagccactgggcctgttcgatgatggtgctcagcgcctggcgcacctgcagcgtctgtgccgccgcctgccgctgctgcgacgaaatcagatccatgcgctgcgcctggctgttcagcgcggcggacagttcgcggttgatctgcaactgttggctgatgcttcttggcaagtcgccgttctgctcggccaactgctcggttttttccagcgccagttccgcttcgcgttggcgctgggcattgaggttgttgcgcagcgcctgcagctgcacgtctattttctcgtggcgctttttatagacctcggcgcgcatgcgcgccagctcctgccggttgttggccgacagctgcgccagctccagctcgtccactttggctttgcgcgccgccgcttcggtctgcagcagggccagggcggcctgcgcgtacggcgtggtcgggttggcaggctgcgcctgcaggcggcgctgcacttccgtcagcgcacggcgagcgtcggtctgctgctgcggcagctggccgagcgaatcgctgatctcccgcgtgcgatcctgctcttgctgcagcaggcgcgcctgttccagcagcaggctgctggtttgcaggatctgctgttccagctcggcggccggcaaatcgtcgccgttcggcaggatcttgttgctttccagcaccaactgacggcgcagctcctgcgtcatcttcgggaaatcgtcgatcaccctctgatactgctcggagcgagtctgcgactctttgcgctccgtcagccagttgagggcgctttgcagcgcctcggtggtttccgcctgattcggcgcgtttttgctgctttccgcctgcttcagctcctgtttgagctggctctcggtcggcacgggggcggccagcgccggttgccacaacaggcaaccgagcaaaagcgtgatgaaaaggcgcacggcgtcgattcctttagatcggggtctgtggtgtttcagcggcggccgggatttcggcgaaggcttcacccatgcgggtgacggtgccgttatgcagctgcggcgcaaactgcacgctgcctgcggtaaacaggttgatcaccgtggagccgagcttgaaacggcccatctcggcgcctttttccaatgtgatggcgccttcttcaccagcggccgggtaggtccagcgcttgataatgccttcgcgcggcggcgtgacggtgccggcccagacggtttcaatgctgccgacgatggtggcgccgaccaggatttgcaccatcggcccgatgtcggtgtcgaagacgcagatcacgcgctcgttgcgtgcgaacaggttaggcacgttggcggcggtgagcgggttgaccgagaacagatcgcccggcacatagatcatttcgcgcagcacgccggcgcacggcatgtggacgcggtgatagtcgcgcggcgccaggtaggtggtggcgaacaggccgttgcggaacggctcggccaacagatagttgccggccagcagcgcttccaggctgtagtggtggcctttggcctggaagatttgatcctcgcggatcgggccgagctggctgatggcgccatcggcgggcagcgccagccagttggcgtcggcgatgatcgggcgcgcgccatcgcgcagcgggcgcacgaagaagtcgttgaaggtggcgtaagacgccaggtccgggttttgcgcttcctgcatgtccacgcggtagtagcgggcgaaggttttgaccaccagttgggtcagccagccggcacgtttgtcggcgccccagcccgccaggcgggtcagcgccagcttcggcagccaatattgcagtttaatcttgatgctatccagcacgttaacctcgtgaatcagggtaaagggcgcgcattgtaacgagggctccgccgtcgtcaatgcccgcccgtcagtgtcagtctgcggcgtccgtgaagttcttgcgaaccttcacctgcgccatgctttccagaatgcggtggtagttgtcgaaacgctcttccgcgatatcgcctttctccatcgccgcgcggatagcgcagccgggatcggtatcgtggcggcagtcgcggaatttgcaaccgcctaaataatcacggaattcgacaaagccgcgggtaatttgttccggctccaggtgccacaggccaaactcgcgcactccgggggagtcgatcacgtcgccgccgtgctggaagtggtacagccgcgcggcggtggtggtatgttgcccgaggcccgagacgtcggaaacctgatttaccagaatttgctcttcagacggcggcagcagcgcgttcagcaggctggatttgccgacccccgactggccggcgaagatgctgatgcgcccggccagcgcctgttcgaattccgccatgccttcccgcgtctggctggagacttccagcacccggtagccaatcttgcgatagatatccatcatgccgtcgaccagcttgcgcgcttcggcgtccagcaggtcaattttgttgagcacgatcagcggctcgacttcgagcgtttcgcaggccaccagatagcggtcgatgatgttcagcgacagctcgggcaggatcgccgacacaatgacgatctgattgatattggcggcgatcggcttcacgccgtcatagaagtccgggcgcgtcagcaccgaggtgcgctcgtgcaccgcttccacgatgcccttcaccccttcatgggtgcccaggccggggcgccacaccacgcgatcgccggtgaccagcgaacgcagcgtgcggcggatgttgcagcggtgctgagtgccatccggcgcctcaacgtcggcgtgcatgccgaaacggctgatgacgacgccttcctgcggctcgcccagctgggaatcatccggttccggtttgttatcggcgcgcttcaaacggcgctgatggttcgcctgcacgcggcgttgctgacctttggacagtttgttcttactcactgcgcctcacttgaatcggttttatacctttacgtatatgcacagccgcggcggggagttgcccccggcgcagccttgaacccgtcagggtatatgtcgcccaaggcgaccaaaaagactatgatacacgctattttatattaaataaccgttgttagccgccggctgcggcgcgtcgccaccggcggcgcccgtcgtctcgtccgcacagcgtttttctctcggcttttaggcaggaaacatcatgacaggaaacgaaaataacctgatttggatcgatttggagatgaccgggctggatcccgagcgtgaccgcattatcgagatcgccacgctggtcaccgacgccaacctgaacatcctggccgaagggccggtgatcgccgtgcaccaatccgacgagcagctggccttgatggacgagtggaacgtgcgcacccataccggcagcgggctggtggagcgggtgaaagccagccgccaggacgatcgcgccgccgagctggaaaccatcgccttcctgcagcaatgggtgccggccggcaaatcgccgatctgcggcaacagcgtgggccaggatcgccgtttcctgttccgctacatgccggagctggaagcctacttccattaccgctacctggacgtcagcacgctgaaggaactggcacgccgttggaagccggaaattctcggcggctttaagaagcagggcacccatcaggcgctggatgacatccgcgaatcggtggccgaactggcttattaccgcgaacatttcattcagctctaaggcgatggcggcccctgcggggaaaaaacgccgtttttagccgcttaattcgccaatctggcgctttaatcggcaatcaaacaaaaatcgcgtttttttgctttcaggggcttgcggcaaaaaggatttctcgtataatgcgcaccccgtaccgatgaagaatttcgtaacgttccaccatcgatacgccgggcgggaatagctcagttggtagagcacgaccttgccaaggtcggggtcgcgagttcgagtctcgtttcccgctccaaaaattcaaaggtcacgccagtgtttggtgaccggatgccgaaagcatctctatgcgggaatagctcagttggtagagcacgaccttgccaaggtcggggtcgcgagttcgagtctcgtttcccgctccaaattcaacaatgtcgcgatgcggcatgatgaataaataaagcagtatcaagcagtacctatgcgacgcgggaatagctcagttggtagagcgcaaccttgccaaggttgaggtcgcgagttcgagcctcgtttcccgctccaattttctcttcgtttcaaactcaagtccaacgccttatccggcgcggatttttgtcccgttttacacgcccggtaaaaatgttgtgaacagagttatccacagcctctgcacataaactcgcctgcctgaaaaatcaacgtcatacaaattaaatatttatctatttgatttatatgcttatttatttatcccaaaacgttatgccgatcacttgctctttttgttgcagttgaaagacaacgtgtttttatttttatgcacaaatccacagagtaaggatgccggtgatgcggccgcgcggcgcacgccgtcaggcgtccctcggcaaacctttttccacagcccgtatcagccgttttttctgtgccgtctgcacctcgatgccctgcgcttcacggcgagcaagctgttgcgccagcgcccagtggatatgttcgtccagcatgctgtcctggcccaaacgcgtgcgcagcgcgagcacgacgccgtcctcataaggcgcattgcccagcgccacggcgatattgcgcaaccagcgcaggtggccgatgcggcgtatcgccgagccttcggtgatgcgcaggaatttttcttctgtccagttgaacagatcgatcagctgcggcgcatgcagtgcggcgcgcgggctgaaatcgtcttcgtcagtgagctgcgaaaagcgattccacgggcagatcagctggcagtcgtcgcagccgtagatgcggttgccgagcagcgggcggaattcttccgggatcgcgccttccagctcgatggtgaggtaggagatgcagcgccgggcgtcgacagtatagggggcgacgatggcgccggtcgggcaagtggtgatgcaggcgacgcagcggccgcactgctcttcctgcggccgatccaccggcagcggcagatcgatcagcaactcgccgaggaaaaaccacgacccggcttcacggttgagaattagtgagtgtttaccaacccagccgatgcccgccttggcggccagcgcgcgctccatcaccggcgcagaatcgacaaaggggcggaaattcaactcgccgcagtattcctggatctgatcgcccagttttttcaggcgctggcgcaacagcttgtgatagtcacgccccagcgcgtagcggctgacgtagcccagttgcgaattctgcaaggtgctggcgaacgccgccttggccggcaggtagttcatgcgtacgctgatcactcgcagcgtgcccggcaacagttcgtgagggcgtgcgcgcaacatgccgtggcgcgccatccattccatctcgccgtggtactgcttgtcgagccaggcctgcagcttcggctcttcaaggctcagatcggtatcgcagatgccaacctgctggaatcctagcgattgcccccattgcttgatatgttgggcgagttgatgaagatcgagggggtgcgtcatgacgggccacagtgaaaaagcatacgctgacagtttaccacactctgtctggcctgcggattggatccgtcgctcggaacccgcggcggcggcctcgctcggtatttctctttacgatttgatgcagcgcgccggtcaggcggcctacgcgctggctcgcaacgcgtacccctcccgtgaccactggctggtgctgtgtggccacggcaacaacggcggcgacggctatgtggtggcgcgcctggcgaaggcggcgggcgtgcaggtgacgctgatcgcctgcgaaggcgcacgccctttgccaccggaagccgcagcggctcgcgaggcctggcaagctgcaggcggcgacattctgccggcgaacagccgctggccggcgtctgtttcgctcattatcgacggcttgctgggcactggccttggcagcgcgccgcgtgcgccttttgatgcgctgattgaggccgccaaccgccattcggcgccggtggtggcgctcgatgtcccgtccgggctgctggcggaaagcggcgcggcgccgggcgcggtggtgcgtgccgcgcataccgtcacgttcatcggcctcaaaccggggctgctgaccggccaggcgcgcgactgggtcgggcaacttcatcagaatgcgctaggcttatcgggttggttggcgaagcaaccggagcagattcagcggcttaccgccgaggcgttgccgcgctggctgcatccgcgccgtccttgcgcgcataagggcgagcatggccgcctgctgttggtgggcggcgatagcggtttcggtggcgccattcgcatggcggcggaggcggcgctgcgcagcggggcaggattggtgcgagtgcttactcacattgatcatgttgcgccgctgctggcggccaggccggagctgatggcgcaggcgctcgacgaggcgacgctgcggcaggcgatgcaatgggcggatgtgctggtgattggcccggggctgggccaggctgagtggggcaaaaacgccttgagcgtgctgcaaaccagcgataaaccggccttgtgggacgccgatgcgctgaacttgctggcattaaatcccgagaaacggcagaatcgcgtgatgactccgcatcctggagaggcggcgcggctgttgagctgcagcactgccgacatcgagagtgatcgcttacttgccgtgcgcaagctgacggcgcgctacggcggcgtggcggtgctgaaaggcgccggtacgctgatcgccgatgagcaggggcagatggcgatcgccgacgtcggcaacgccggcatggcctccggcggcatgggcgatgtgctgtcgggcatcatcggcggtttgctggcgcaaaagctcccgctgtatgatgccgcctgtgcgggctgcgtcgtgcatggcgcggccggcgatcgcgtagcggaaagacaaggaacaagaggcatgttggcgaccgatttactgccggacatccttcatttcgttaaccctgagtgggcaaaatagactttatcgaatgaaagaactcgttttacctctgccggacgaggcagcgactgtcgctttgggcaccactttggccaaggcctgcgatcgcgccagcgtcatctatctctacggcgacctgggcgccggtaaaaccaccttcagccgtggcttcctgcaggcgttggggcatcagggcaacgtcaaaagcccgacctacacgctggtggaaccctatgccttgcagccgctggcggtgtatcacttcgatctgtatcgcctggccgatccggaagagcttgaattcatgggcattcgcgattacttcgcgcaagacgccatctgcctggtcgaatggccgcagcagggcaccggcgtgctgccggagccggacctggcgctgcacctcggctatcagggcgagggacgagaggcgaagatcgaggcgatttctgcttacggcagccagctgttagaccgcattcatggatcacagggatgatgctgcaatgacgcaggtgttgaaaaaatttgcggtcatcatgctgatcgccgtgctggggccgctcggcgcgttgaacgcgctggcggcgtcctcgctgtccgatatcaaagtgtcgaacgcccaacgcgaagcgacggtgtcggtgagcttcaatggcccgccggactatgcgtttttcccgctgcacggcccggaacgggtggtgctggacgttaaccagaagggcaaagtcggcggcctgccgctcaactttagcgggcaaaacctggtaaagagcattcgctccagcgcgccgaaagacgctcagagcgtgcgtctggtgtttgatctgacccagcgcgccaaaacccgcgtttccactcgccagaacggcggcgtgcataccgtggtgttcaccatttcggccgaaggcggcgccaatatcgtggcgcgtaaagcgccggtgcaaacgcctccgccggtcgccgtcagccacccgccgcgtcaggcgccggttgcggtgcgtgaagcgccggagccgccgctgcgcaaagcgccgacgggatcgaatccctttacccaaaaacagactgtggtcgcaggcaccgccactgaggtcacgccgcgcagcagccgcgtttccgccggttccggcgatcgggtggtggtggcgatcgacgccggccacggcggccaggatccgggagccattggcccgagcgggttgaaagaaaagaatgtcaccatcgccatcgcgcgccgcctgcaggcgatgctggacgccgatccgcagttcaaaccggtgctgacgcgtaacggcgactattttatctcggtgatggggcgttccgacgttgcgcgcaaacagggcgccaacgtgctggtctccatccacgccgatgccgcgccaaaccgcagcgccagcggcgcttccgtctgggtactgtccaaccgccgcgccaacagcgaaatggccggctggctggaacagcacgagaagcagtctgagctgctcggcggcgccggcgatttgctggccaatagccaggccgacccttatctgagccaggcggtgctggatctgcagttcggccactcgcagcgcgtcgggtacgatgtggcggtgaaggtgctgcagcagcttcagagcgtcggctcgttgcataaacgccggccggaacacgccagcctgggtgtgctgcgttcgccggatattccatcgctgctggtggaaacaggatttatcagtaatagcacggaggagcggctgctgggcagtagcgcgtatcaggagaagattgccaaggccattcataacggcctgcgcagctacttcctggcgcatccgctgcaagccgacccaaaggtggaaaaccgaccgctggacgtcgcagcggcggttaacacctcaacaccagacgtgcgccagccggagcctatcgtcagcccggccggcgcgagccgcagcattagcggcaaaacccagatccacgtggtgaagcgggcggagacgctgtccggcatcgccgacagctacggcaccaccatggcggccctgcgggatctgaacaaactgaagaaagacggcgtgtgggtcgggcaacgcctgaaggtgccggcggggaaaaccgccgccgtcaccgccgtcgccaaggcgaaaacgccggcgaagaagccgtctaaacataaagtggcccgtggggacacgctgtcctctatcgcttctcgttatggggtcagcgtcggcgatctgaaacgggtcaataatctgaagtcggacgtcgcgccgctggatcggacgctgaccattccgcaggcctagcgccaccgctacaggagtcagcatgcctatccaggtgttaccgccacagctcgccaaccagatcgccgccggagaggtggttgaacgccccgcgtcggtggtcaaagagctggtggaaaacagtctggacgccggtgcgacgcgcatcgatatcgatatcgaacgcggcggtgccaagctgatccgcattcgcgataacggctgcggcatcggcaaggacgacctggcgctggcgctggcgcggcatgccaccagtaaaatcagcacgctcgacgacctggaagcgatcgtcagcctcggttttcgcggcgaagcgctggccagtatcagttcggtgtcccgtttgaccctgacgtcgcgcaccgccgagcagagcgaagcgtggcaagcctacgccgaagggcgcgagcaggcggtgacggtcaaacccgccgcgcacccggtcggcagcacgctggaagtgctggatctgttttacaatactccggcgcgccgcaagttcatgcgcaccgagaaaaccgaatttggccatatcgatgaagtggtgcggcgcatcgcgctggcgcgtttcgatgtggcgatcaacctcagccacaacggcaaactgatccgccaataccgggcggcgaaggaagagagccagcacgagcgccgtttgggcagcatctgcggcccggcgtttttacagcatgcgttgagcatcgactggcagcacggcgatctgagcatccgcggttgggtggcggatccggccggggcacgccagctgggtgaaatgcagtattgttacgtcaactgccgcatgatgcgcgatcgcttgatcaaccacgccattcgtcaggcctatcaggaccagttgaaggacgatcagcagcccgcttacgtgctgtatctggaggtcgatccgcaccaggtggatgtcaacgttcatcccgccaagcacgaggtgcgtttccatcaggcgcggctggtgcacgattttatctaccaggcagtgaccaccgtgctgcaacaggccgggcagacgccgtcgctgccgctggcggaaacgccggacgaagcgcccgcgccggtctggcagcaggaaaaccgcgtcgccgccggcggcaaccatttttctctgccggcgtcgcgacgtgaaacgccgtcatcgcccggcgccgcccgcgagcgcgcgccgcagcccggttggcaaacggcgggcggttaccaaaaacgcgaaggcgagctgtacggtaaactgatgcagcccgccgccgagctgccggccgaggccgcgccggaaaccccgagcaagccgccgctgttcccgccggcgaaagccgcagcggaaacgccgttggcgagcgggcaacacagctttggccgggtgctgatgatccatccgccgtgttatgcgttgattgaacagcgccagcagccggcgttgcttaacctgacggtggcggaacgctggctgcgccaggcgcagctcaacccgccggcagaagggctgcggccgcagccgctgctgatcccagtcaagctgacgttggagaagagcgaagcggcggccatcgcgcggcatcaggcgctgctgacgatgatggggctggatctgcaggcggatcacggccgtgtgacgctgcgcgcagtgcctttaccattacgccaacaaaatttacaaaaactgatacccgaactgttaggctatctggccgaacatcaggagatgtcgcccgcggtgctggctacctggctcgctcgccgccttggcagcgaacatgaacagtggaacacctcgcaagcgatacaattgctgaccgacgttgaacgactttgcccgcagctggtcaaatcgccaccgagcggacttttacaacccgttgatttacaggccgcactggcggccctcaagcatgactgacactgaaatgacaccacgtcccccggctattttcatcatggggccaaccgcctcgggcaagactgcgctggcgatcgcgctgcgtgaacgcctgccggtggagctgatcagcgtcgattccgcgctgatttaccgcggcatggatatcggcaccgccaagccgagcgccgaagaattggcgcaggcgccgcaccggctgatcgatatccgcgatcccgccgaagcttactcggccgcggagtttcgcgccgatgcgttgaaagagatggccgacatcaccgccgccggccgcattccgctgttggtgggcggcaccatgttgtatttcaaggcgttgctggaaggattgtcgccgttgccgtccgccgatcccgcggtgcgcgagcgcatcgaacggcaagcggcggagcagggctgggaggcgttgcaccgtcagttacaggcgatcgatccggtcgcggcattgagaattcatccgaatgatccgcagagactgtccagagcactggaagttttttttatttcgggtaaaactttaacggaactgactaaaatttcgggtgaatcgttgccgtatcaagttcaccaatttgcgatagcgccgaccagccgtgagttgatccatcaacgcatcgagctgcggtaccatcaaatgttggcggcgggttttgagacggaagcgcgtgcacttttcgcacggggtgatttgcatacggacttgccctccattcgctgtgtcggttaccgccagatgtggtcatacttgtctggtgaaattagttacgatgagatggtttatcgtggtatttgcgcaacgcgtcagttggctaaacgccagatgacctggttacggggttgggagtcggtccattggttggacagtgaaaagccgggagaggctttggactcggtgacacaggttgttagtgcataggttgggtgattgtgtacaattgctgagtattcagcgcgcaaattttttacgtcgtttattttagagccgacaggttcttagttacaaacaacaagcaaataaggaaaagatagaatggctaaggggcaatctttgcaagatccgttcctgaacgcattgcgtcgtgaacgtgttccggtttctatttatttggtgaatggtattaagctgcaaggccagattgagtcttttgaccagtttgtcatcctgttgaagaacacggttagccagatggtgtacaagcacgctatctctaccgttgtcccgtcacgcccggtttcgcatcacagcaacaacccgagcggcggttcaagcaactatcaccatggcaacaatccgtctgcgcagcaacagccgcagcaggaaagcgatgacgctgaataaagcgcgttgcaagtcaaccatgacggggagcataagcagccgcgggctgtttatgtcccccaaactcacggtgagtgtccgtttgagaggttgcacgcttgtttgaccgttatgaagccggtgagcaggccgtactggttcatatctatttctcgcaagacaaagatacggaagacctcaacgagttcgaatcgctggtctcctcagccggtgtcgaagctttgcaagtggtgactggtagccgcaaagccccgcatccgaagtactttgtcggcgaaggaaaggccgaagaaattgcagatgcggtgaaagccagcggcgcgtctgttgtcctgtttgatcattccctttccccggcgcaggaaagaaacctcgagcgcctgtgcgaatgccgggtgatcgatcgcaccgggctgattttagacatctttgcccagcgtgcccgcacccatgaaggtaagctgcaggtggagctggcgcagttgcgtcacatcgccacgcgcctggtacgcgggtggacgcacctggagcggcaaaaaggggggattggcctgcgcgggccgggggaaacccagcttgagaccgaccgtcgcctgttgcgcgatcgcatcagcttgattctgcgccgcctggagcgggtagaaaagcagcgtgaacaaggccgacgcgcgcggacccgcgccgatgtgccgaccgtatcgctggtgggctacaccaacgccggcaaatccaccctgtttaaccgaataacgtctgccgaggtgtatgcggcggaccagctatttgccaccctggatcctacgttgcggcgcattgacgtgccggacgtgggggataccgtgttggcggataccgtaggctttatccggcacctgccgcacgatctggtggccgccttcaaggcgacgctgcaggaaacgcgccaggcatctctgctgctgcacgtcatcgatgccgcagatccgcgcgtcgatgagaacatcgaagcggtgaacaccgtgctggcggagatagactcggatgaaatccctacactgttagtgatgaataaaatagatatgctggacgattttgtgccgcgtatcgaccgcaacgacgaaaacctgccgatccgggtgtggctgtccgccgccagcggagagggtattccgttgctgtatcaggcgttgacggagcgcttatcgggggagatcgcgcattacgaattgcgcttaccgccacgggcaggccgtcttcgcagccgtttttaccagcttcaggcgattgaaaaagagtggaacgaagaagacggcagcattggcgtggtggtgcgaatgccgatcgtcgaatggcgtcgtctctgcaagcaagaacaggacctgattgactttatcgtatgatcatatcctgttacatttatgcttcgcgaaagcctgaagtacccaatcacagaatatggagctaaaacatggcgtggaatcagcccggtaataacggacaggaccgcgacccgtgggggagcagcaataacaatggcggcaactctggcggtaacaacaaaggcggtcgtgatcaagggccacctgatttggacgatatcttccgcaaactgagcaagaaattgagcggtttcggcgggggcaaaggctccaacagcaatagcggcggcaccggcacctctgggccgggcttcagcggccgcattatcggtatcgcggcggtcgccgtggtggtgatctgggccgccagcggcttctacaccatcaaggaagccgagcgcggcgtcgtgacgcgtttcggtaagttcagccatctggtgcagccgggcctgaactggaagccgaccttcatcgacgacgtgcgtccggtgaacgtggagtccgtgcgcgaattggcagcgtccggcgtgatgctgacctccgatgaaaacgtggtgcgcgtggaaatgaacgtgcagtaccgcgtgaccaacccggaagcgtacctgttcagcgtcgtcaatgccgacgacagcctgagccaggcgaccgacagcgccctgcgcggcgtgatcggcaaatactcgatggatcgcatcctgaccgaaggccgtaccgtggtgcgtaacgatacgcagcgcatgctggaagagaccattcgtccttacaacatgggcatcacgctgctggacgtcaacttccaggcggcgcgtccgccggaagaggtgaaggcgtcgttcgacgatgcgatcgccgcgcgtgagaacgagcagcaatacatccgtgaagcggaagcttacgccaacgaagttcagccgcgtgcgaacggccaggcgcagcgtctgctggaagactccaaggcttataaggaccgcaccgtcctggaagctcagggtgaggtggcgcgctttgccaagctgttgccggaatacaagtccgcaccgcagatcacccgcgagcgtctgtatatcgaaaccatggaaaaagtgctgggccatacccgtaaggtgttggtgagcgacaaaggcaacaacctgatggtgctgccgctggatcagatgctgcgcggccaaggcgcggcgacggagagcggcaataataaggataccagcctgattcgccttaatccgaatcctgcgccggctgccaacagcagcactccgcgcaccagcggcggatcggttatggatcagcgccgggcgaatgcgcagcgtgacgacaccactcgcgtagggagagagtaatcaatgcgtaagtcttttgtagttattgtcctcgcggtgctggtggtgctgtacgcttcgctgttcgtggtgcaggaaggccagcgcggcatcgtgctgcgcttcggcaaggtgctgcgcgatggcgaaaacaagccgctggtgtatgcgccgggtctgcacctcaagatcccgttcattgagaccgtgaagaacctggatgcgcgtatccagaccatggacaaccaggccgatcgcttcgtgaccagcgagaagaaagacctgatcgtcgactcctatctgaagtggcgcatcagcgatttcagccgttactatctggcgaccggcggcggcgacgtctcccaggccgaagtgctgctgaaacgcaagttcagcgaccgtctgcgttccgaaatcggtcgcctggacgtgaaagacatcgtgaccgactcgcgcggcaagctgatgtctgacgtgcgtgacgcgctgaacaccggcacagtgggcgacggcgaagaagtggcgaccaccgaagccgatgacgctatcgcctctgcggcggcgcgcgttgagcgggaaaccaccggcaaacagccgcaggtgaacccgaacagcatggcggcgctgggcatcgaagtgatcgacgtgcgtatcaagcagatcaacctgccggccgaagtgtccgacgccatctaccagcgtatgcgcgccgagcgtgaagcggtagcccgtcgtctgcgctcgcagggccaggaagaggccgagaagctgcgcgccagcgcggattacgaagtgacccgtaccctggcggaagcagagcgtcaggcgcgtatcacccgcggtgaaggcgatgccgaagcagccaagctgttcgccaatgcgttcagccaggatccggacttctatgcctttatccgcagcctgcgcgcctatgaagccagcttcaaggacaaccaggacgtgctggtactgagcccggacagcgatttcttccgctacatgaagtcgcctgataccctgcgcaaataagcgcggcaggcaatctgatcgagggcccgtttacgcgggccctttctcgtttttgggggatgcatgaactcaacgatttggctggcgctcgggctggttctggtgctggaaggattggggccgatgctgtttccgcaggcctggcgcaaaatgattgtggcgatgtcgcagttgccggacgcgacgctgcggcgatttggcggtggaatagtggttgcgggctgcgtgatctactacatgttgagcggccgcacgggtctttaaagtctagcccaaaatttatgcaatcgtatgctaaaagtgctgaaaatcgaaaattacggtggtagaatccatttttaagcaatcggtgattttgaaaaatgggtaagaacgtcgtcgtactgggcacccaatggggtgacgaaggtaaaggcaaggttgtagacctgctgactgaacgggctcaatatgttgtgcgctaccaaggtggccataacgctggccacactctggtaatcaacggtgaaaaaaccgttcttcatttaattccttcaggtattctgcgtgaaaacgtcaccagcatcatcggcaacggtgttgttctggcgccggacgcgttgatgaaagaaatgggtgaactcgaagcgcgtggcatcccggtacgcgaacgtctgttgctctctgaagcttgcccgttgatcctgccttaccacgttgcgttggataacgcgcgtgagaaagcgcgcggcgcgaaagcgatcggcaccaccggtcgcggcatcggcccggcttacgaagataaagtggctcgtcgcggcctgcgcgtcggcgatctgttcaacaaagaaaccttcgccgttaagctgaaagagatcgtcgattaccacaacttccagctggtcaactactacaaagttgacgccgtcgattatcaggcgacgctggactatgtgctgtctatcgccgacatcctgaccgccatggtggttgacgtttccgaactgctggacggcgcgcgcaagcgtggcgacctgatcatgttcgaaggcgctcagggcaccctgctggatatcgaccacggtacttacccgtacgttacctcttccaacaccaccgcaggcggcgtagctaccggttccggcattggcccacgttatgtggactacgtgctgggcatcgtgaaagcctactccactcgcgtgggtgcaggtccgttcccaaccgaactgttcgatgaaaccggcgagtacctgtgtaagcagggtaacgagttcggcgccaccaccggccgtcgtcgtcgtaccggctggctggacgcggtagcggtgcgccgcgccgtgcagatcaactccctgtccggcttctgcctgaccaaactggacgtcctggacggcctgaaagaagtgaagatctgcgtgggctaccgcatgccggacggccgcgaagtggacaccactccgctggcggctgaaggctgggaaggcatcgagcctatctacgaaaccatgccgggctggagcgaaaccacctttggcgtgaaagagcacagcaagctgcctcaggctgcgctgaactacatcaagcgcatcgaagaagtgaccggcgtaccggtagacatcatctctaccggcccggatcgcagcgaaaccatgatcctgcgcgacccgttcgacgcataatcaggctttgcggcattaaacaaaccgggcgcgtcccggtttgtttttatcctgactccctccgattgcggtttcacgtcaaaaaatcctttcataaacccgccttagggcgcgggattcgctaaataattagcgacgaactctccggctggtttattatccaatgagtaatcttttgaatagcgccgaaaagcggcgtatcagacgggtaaagtgatacccagaggtaaaatgtgcagttaacaagttttactgattatggcctgcgggcgttgatctacatggcctcgttgccgcaggacaagatgaccagcatctcggaagtgaccgaggtttatggcgtgtctcgcaaccatatggtgaagatcatcaatcagttgagccgggtaggttttgtcacggcggtgcgcggtaagcatggcggcatccgtttgggcaaaccggccgagagcattcgcctcggcgacgtggtgcgggcgctggagccgctcgcgctggttaactgcagcagcgagttttgccacatcacccctgcctgccgattgaagcaggtgctccaacagggcgtacagaatttccttgaagagctggataagcatacgttggccgacatggtcgaagacaatccgccgctctacaagctattgcttgtcgaataaaacgacgttgagaagacaaggctcaacgtcatcctgctgatgacaacggaggaaccgcaatgtcacaagatccattcctggaacgagaagcagaaaaatacgaatctcctatccccagccgtgaatatatcctggcccatttggcgaaaagagaaacgccggccagccgcgaagaactgggcaacgaattgggtctcagcggtgaagaacagctggaagcgctgcgccgccgcctgcgcgccatggagcgcgatggacagttagtgtttacccgccgccagtgctacgcgctgccggaacgtttggatctgctgcgcggcacggtgatcggccaccgtgacggctacggcttcctgcgcgttgaaggcagcaaagacgacctgtacctgtccgccgaacagatgaaaatggcgatccacggtgacgtggtgctggcgcaggcgctgggcgcggatcgcaaagggcgccgcgaagcgcgcatcgtgcgcgtgctggtgccgaaaaccagccagatcgtcggccgcttcttcatggacgccggtaccggcttcgtggtgccggacgacagccgtctgagcttcgatattctgatcccggcggacagcgtcagcggcgcgcgcatgggctttatggtggtggtggagttgactcagcgtccgacccgccgcaccaaggcggttggcaagatcgttgagatcctcggcgacaagatgggcaccagcatggcggtggacatcgcgctgcgcacccatgagatcccgcatacctggccgccgcaggtggaaaaacaggtggccgatctcagcgaacaggtgccggaagcggccaagaagggccgcgtcgatctgcgcaagctgccgttggtcaccatcgatggtgaagacgcgcgcgacttcgatgacgccgtgtactgcgagaaaaaacgcggcggcggttggcgcctgtgggtggcgatcgccgacgtcagctactacgtgcgtccgcgcaccgcgctggacgatgaagcgcgcagccgcggcaactcggtgtatttcccgtcgcaggtgatcccgatgctgccggaagtgctgtccaacgggctgtgctccctgaacccgcaggtcgatcgcctgtgcatggtgtgcgagatgaccatctccgcccaggggcgcctgtccacggccaagttctacgaggcggtgatgagctcccatgcccgcctgacctacaacaaggtgtggcacattctgcagggcgatcaggagctgcgcgagcattaccatccgctggtcaagcacctggaagagctgcacgccatgtacaaggtgctggataaggcgcgcgccgagcgcggcggcatcgcgttcgaaaccgaagaagccaaattcatcttcaacgccgagcgtcgcatcgagcgcgtagagccgacggtgcgcaacgacgcccacaagctgatcgaagagtgcatgatcatggccaacgtggcggccgcgcgcttcgtcgagaaacgcaacgagccggcgctgtaccgcgtgcacgatcgtccaagcgacgatcacatctccgcactgcgcagcgtgctgagcgaactggggctgacgctgggcggcggcaataagccgcagccgaaggactatgcggtgctgatggatgaagtgtctgagcgccctgaccacgaaatgctgcaaaccatgttgctgcgctcgatgaaacaggcgatttacgatccggaaaaccgcggccacttcggcctggcgctggcgtcttacggccacttcacctcgccgatccgccgttatccggatctggcgctgcaccgcgcgatcaaatatcagctggccaaagaacacggcgagccgaaagagcgctggacgccgaccggcggctggcacagcgaatttgaagagatgctgcagctgggcgaacactgctcgatgaccgagcgtcgcgcggacgaagcgacgcgcaacgtcgccgactggctgaagtgcgacttcatgcaggatcacgtcggtgaagtgttcagcggcatcatctccagcgtgaccggcttcggcttcttcgtgcgcctgaacgatctgtttatcgacgggctggtgcacgtatcaacgctggataatgattactatcgctacgataatatcggccagcgcctgatcggcgagtcttccggcacggtctatcgcctgggggatacggtggagatccgcgtggacgcggtgcatatggacgagcgcaagatcgacttcgcgctggtgtccagcacccgcaaagcgcgcggtgaaggcaaaaccgagcgcgatcgcgccaagaaaggcggccagcgtacgctgcgcgacaacggtagcgcagggcgcggcaagcgccgcggcggcaaaccgccggccaacttcgagccggacagcgccttccgcaagcaggatgacgccaagcctgcggacaacgtgaagaaggcgaaaaagaaagccaagaaagcgtccgacaaaacgcggaaaatcgcggcggcgaccaaagccaaacgcgcagccaagaagaaaggtgccgagcaggcctaacctgccgcacatcgttatcatcggccggttatcgccggccgcacgaatttaaaagagcatcatgagcgaaattatttacggcatccacgccgtcaaagccctgttagagcgcgacccgcaacgcttcctggaagtgtttatcctgaaaggccgcgaagatcgccgcctgcaaccgctgatcgccgagctggaagcgaccggcatcgtgatccaggtggcgaaccgccaatggctggatgacaaggttgaaggcgcggtgcaccaggggatcatcgcccgggtgcgcgaagggcgtcagtatcaggagaacgatctgccaggcctgctggaaagcgtggagacgccgttcctgctggtgctggatggcgtgaccgacccgcacaacctcggtgcctgcctgcgcagcgccgacgcggccggcgtgcacgcggtgatcgtgccgcgcgaccgttccgcccagctgaacgccaccgccaagaaagtggcctgcggcgcggctgaaaacgtgccgctgatccgcgtgaccaacctggcgcgtacgctgcgtctgctgcaagagatgaatgtctgggtggtgggtaccgccggtgaagccgaccatacgctgtatcagagcaaaatgaccggcccgatggcgctggtgatgggcgcggaaggcgaaggcatgcgccgcctgacccgcgaacactgcgacgagctgatcagcatcccgatggccggtaccgtctcttcgctgaacgtgtcggtcgccaccggcatctgcctgttcgaagcggtgcgtcagcgcggctgattctcctgacgggggcgcagtgcccccgttaattccccctcttgtgatcccgcctgcggcagaaatccctgcgccgaccatacttactcctgacgcttttttcagggagcactctcatggtctggactacgcacaccgtttttaaccaacccaagccgctgggcaacagcaacctgtttctctccgatacgccgctgcgtgaagcgttgcagcgcgagcaaggcggttgggacgccgaggtattggcttcgctgggccagcagctcggcacgcaggagtcgctggagctggggcggctggccaacgccaacccgccggagctgctgcgctacgacgccaccggccagcgactggacgacgtccgctttcacccggcctggcatatcctgatgcaggggctgatcgccaaccgggtgcacaacctgccctggcaggaggatgcgcgcatcggttccttcgtggcgcgcgccgcgcgctttatgctgcatgcgcaggtcgaggccggcacgctgtgcccggtgaccatgaccttcggcgccacgccgctgctgcagcaggcgttaccggccgagtttcgctcctggctgacgccgttgctgtcggatcgttatgacgctcacctgctgccgggcgggcaaaagcgcggcctgctgatcggcatgggcatgacggagaagcagggcggctccgatgtcttgagcaataccaccaccgccgtgccgctcggcgcgcgtgggccgggcgaagcctaccggctggtggggcacaagtggttcttctcggtgccgcagagcgatgcgcacctggtgctggcgcaggccgaaggcgggctgtcctgcttcttcctgccgcgcattttgccggacggcagccgcaacgccattcgcctggaacggctgaaagacaagctgggcaaccgctccaacgccagcagcgaggtggagtttcaggacgccgcggcctggctgctgggcgatgagggcgacggcgtgcggcatatcctgaaaatgggtggcctgacccgtttcgactgctcgctgggcagccacggtctgatgcgccgcgggttgtcggtggcgttgtatcatgcgctgcagcggcaggcattcggtaagctgttgatcgaacaaccgctaatgcgccaggttctggcgcgcatggcgctgcggctggaagggcataccgcgttgctgttccggctggctcgcgcctgggaaagtcgcagcaatgagggcgagctgatctacagccgcctgctgacgccggcggccaaatacagcatctgccgccagggcatgccgttcatcgccgaggcgatggaggtgctgggcggcatcggctactgcgaagagagcgagctgccgcgcctgtaccgtgaaatgccggtgaacagcatctgggagggctccggcaacatcatgtgtctggacgtgttgcgcagtctgcataaactgccgggcgcgctcgagatgttgcagttcgagctgcagccggtgcgcggccagaatcggttgttcgatcacgcctggcggcagtggcagcagcgcgcccggcaaccgcgtgaagagatggggcggctgctgacccagcagctgttcgacctgtgctgcgccgcgcagctgctgcagcatgccagcccgcagatcgccgacgcctggtgccacctgacgctggatcatcgcggcgagagcctgctgtcggccgaggtgtgcgaactgctgctgaaccgcgccatcggcggttagggaaaagggtggcgcgcggcggcgaaaacctttttaattcagcctcactctgacaggaaaatgcacatggatattctcagcgcgttggcggcgttcgcctcttacttcttcagcggtttcgccatgattttggtgtttctgttcgtctatacccgcatcaccccgcacgacgaatgggcgttgatcaaggccgataatcaatccgccgcctttgctttcatcggcgcctgcctggggtatgtgatcccgctggccagcgcggcgatcaactcgatcagcctgctggattacctgctgtggggcgtggtggcgctggtggtgcaactgctgctgttcgcggccgtgaagatctacatgccgcgcatcagcgacaagatagaagcgaatcacctggccgccgggattttcctggggggcgtctccgtcagcggcggcgtgttgaatgcggcttgcatgagctactaaaggtataagatggccgaggcgcgccagccaagcgggtgcgcctgctcttccatccgcaggatgcggtaatagctggcgccgtgttggccggcggtgcgggcgatggccagttccgcttcctgcggcgagccgggcagatcgctgaaggtgatctcggcgatttcactgagcggcgtcacgcgatcggcgggcgccagctcggcgggctgtgcgccggtgctgagcaaccccatggaaagcaagagggaggtgagtgcggtggagcgtttcatggcgttccccttcgtcagatcctgaatcgcacccgcaacatgcggcatgctgtccctcagtgtgcaacaccctgcttcagcctgtgcaaagccagtgtaaatctgcttaaaaaatccccgccttagcgatacaggatcgcctgggaataccattggcccggcacgacggtttcgctgttcatgatgatcacataataacgggcgccggcggcggtggccttgcgctggatctccgcttccacgtccatcgggctgccgcgtaccacggcggtgacggtgccgattttcaccagctcggcggtctgcgcgcggacgatctcctgcgcctgtgtggtgggcggcggcggcggtttcggcgtggtggtcatgatgccgcaggcggaaagctgtgcggccagcgtcagggcgataagtgtgcggacaaacgtcatgggaacctcgaaagagccggtgcgatggcttcagtgtaacgcaatataagctggaacagattgagctaacgctggctggcgcaagtttgtcatgatgaatgccaacaggtgagttgaggatgaacggatgatcgaaattcatgacgagcgggcgggcgatattgcggtgatccatgcggtgccggcggggcagtatcatcggccgctgccgacggtgttcttctgccatggctatacctcgtcgaaagaggtgtacgcctacttcgcctatgcgctggcgcgcgccggttttcgggcggtgctgccggatgccgatcggcacggcgagcggttcgacggcgatgagacgcggcgcctggcggcgttctgggagatcctgcgcagcaatatcgacgagctgccgcagatcaaggcacattttgagcggcttggcctgattgccgacggacgcatcggcgttgccggcgcctcaatgggcggcatgaccgcgcttggcgccttcgcgcgcttcccgtggatccgggcggccgccagtctgatgggctccggctattaccgttcactggcgcaaacgctgtatccgccgttgggcgaagagggcgaggtgctctcgccggcggcgtttgccgcgcgcaccgccgtgctggcggaatatgagctggaagggcgtttggagacgatagccgggcggccgttgttgctgtggcacggcgagacggacgacgtggtgcctgcggcggacagcctgcgtttggcggccgaactgcggcggcaaggcgcggatggccgtttgacgtcgctcgtcgagccgggggtgaagcaccgcatcacgccgttggcgttgtccgccacggccgactttttccgccgcgagctgtgatgcgccgccgggcacgatgcatggaattgcagcgctctgtgcctgctgtttcggccatcgtttggccgaatgaaggggagaatgtcagcgtgaattctttcagggcagcaaggagcagagggcatgataaaaagcatcggcagtgtggccggcttaatgggaacgatgaaagcgcgcgccgagcttaactcagcggccttcagcgagatgctggaggcagccgacggcaaggtgcatccgctgtcgcgcattaccgcgcagacggtgcaaaacatgacggcactgttctctttcgcgccgaaagcggcggccactcacactgcggcgccgggagcgctctcgttcgaacagcgggcgaccctggcggaaagtgccgatctgctgcaaatgcgcacccactatctgcggatggcgttgcagttgcacaatccgggcaaggcgctcaacgcgccggcgttgctcaagctctgattggcgggggaagcggagcgcccaacgggcggcgctccggtgcggactgaacgggctttctgatgaagccctgggatttccctggcgtggcgcgtctctttagcggtacagctcggcgctgacgtgcatcgtgctgttgtcgcccggttcgtgcagggcgatgatgcgataagagcttgcgccgcgttggtcggcgattttactgacctggctgctggcgtcgtccggcgaaaccacattctggttcagggtgacgaagccgacgctttggcgttgatcggcctggtgcgaggtgatctccgtcgcggccatcacattggcggagaacagggcggccagcgccgtcgcgagaataatgcgtttcatagtgcctctcttactttttgccgttacggcctgacagcgagtgtcgctgcggcaaaaagtcatttatctgcattgaataacctgggatctttttcgtcgcgctgtctgcggcggatatggttaattttagtccgttgccggcgattaaaaagcggggtgttttgaaggcatccttcaaaaaaagtgaaatagatttgtgactcaacgctgatttcattgaaagatttttgaaactgatggatcggcgtacataggttcactcacgagcaaatcgtgctatttcccatagcgcctcgcattaacgcgaataaaacccacgcagtccttgagtttcccgccctgcgtcagtatgattacgcgtcatttttcagccgcacactaaacacgttccttgcttccatgggccgcggttgaccctgacaggaggctgaataatccgtaaggagcaattcgatgcgtcattacgaaatcgtttttatggtccatcctgaccaaagcgaacaggttccgggcatgatcgagcgttacagtgctaccatcactaacgcgcaaggtcagattcaccgtctggaagactggggccgccgtcagctggcttatccgatcaacaaactgcacaaagctcactacgttctgctgaacgttgaagcgccgcaggaagcgatcgatgagctggaaactaacttccgcttcaacgacgccgttatccgcagcatggttatgcgcgttaagcacgcggtaaccgaagcatctccgatggttaaagcgaaagacgaacgtcgtggcgatcgccgcgaagacttcgctaacgaaaccgcagatgatgcagatgctggggattctgaagagtaattgccgccgtgacggctaatcgtctggttttgtcgggcactgtgtgcaaggcgccggttcgaaaagtgagtccttccgggataccgcactgccaatttgtgctagagcaccgttcgcagcagacggaagccggattcagcagacaagcatggtgccgaatgcccgtggttgtcagcggacaacagtcacaagcactaactcaaagattaacggtcggcagtcagattaccgtgcaaggctttgtaagctgccatcaagggcgcaacgggctgagcaaattggttctgcatgccgagcagattgaattgatagattctggagactagccaaatggcacgttatttccgtcgtcgcaagttctgccgtttcaccgcggaaggcgttcaagagattgactataaagacatcgctacgctgaaaaactacatcaccgaaagtggtaaaattgtaccgagccgtatcaccggtactcgtgcaaaatatcagcgccagctggcccgtgctatcaagcgcgcgcgctacctgtctttgttgccgtacactgatcgtcatcagtaatcggccactgtccattaacgactttgagaggataaggtaatgcaagttattctgcttgataaagtagcaaacctgggcagcctgggtgatcaagttaacgttaaagcgggctacgctcgtaacttcctggtaccacagggcaaagctgttcctgctaccaagaaaaacgttgagttcttcgaagcacgccgtgctgaactggaagccaaactggctgacgttctggctgctgctgaagctcgcgcaaccaagatcaacgaactgggttcagtcaccatcgcttccaaatctggcgacgaaggtaaactgttcggctctatcggcacccgcgacatcgctgacgcagtaactgcggcaggcgttgaagttgccaagagcgaagttcgtctgccgaacggcgttctgcgtaccactggcgagcacgaagtgcacttccaggtacacagcgacgtgttcgcacagctgaatgtagttgtggttgcagaagcgtaatttacgctgctgttaaccggttaaaacgccagcctcgcgctggcgttttgcttttctgcgtccggcaaaacgcgctacgcttgaagacgggatgaaaaggagagcgtgcgatggcaacgattacgctacagcgggtttacgatttcagcgcgccggcgccggaacactgttatctgatagaccggctatggccgcgcggcatcagcaaagagcggttgacgggcgtgcagtggttgaaacaggtggcgccggatgacgagctgcgcaagtggttccatcagcataccgaccagtgggaagcctttgagacgcgctatcgccaacagctggcggccaacgacgcctggcagccgctggtggcgctgttacggcaggggcaaacgctgacgctgctgtatggcagcaaagataccgagcacaatcagggcgtggtgctgcgcgagtttctgctggcgcagctgtagagattagcgttcccggcggtagctgccgtcggcctggcggcggaacagcgcctggctgttgtctgccgtggtgaccgacagcgcgctaatcacaccgttggcgtcgcgttcgatgcgcacttcctggccggctttcatgttgctcagcggcttgtcgccgccttccacctgtgccatggcgaacacttcattcaccggcagattgttgtcgcgaaacagttgggccagggtctggccgggctggatctgataacgctgccagttgcctgccagcgtcggttcgttggcaggcgtggcggcgctaccaccgttttgcagctcggcctgcagcggcacgctggtttcctgctgagagaccgggaacggctgtctttcgggcgagtagggccacagcaacgccagcagcagaatgatgccgaagatcagcacccagcggcgatgaaagtagggtagcggttccatccaatggaaaccgtccggcagatgccagactttaatcagcagcgctttgacccgctgcattttgtcgttggccgacggcggctccgatggcggttccgcgccttcagccgtgggtgcggcgcctggtttcaggcgctggctgatgttcagccaggtgcgcagcagcggctggtagatgcgggtggttttccttctcctgggcgcgattctgcccatggtgacctctcttcgacggcgtaataatcagtgcggcgcggcaaacgcgtcgcctgcccgatatcctgctttcagtatagtccgctaactgattgaagtgaaaggcggctgagcggcagagccggggtttgcggctgcgggcgttaacagaaggttattgtttctttttctacgacaaaagtcatcattctccacacaagattttacccggcattgacgcgctgttatgctgcgctttcgactttttacagacttaaggaaaaccccatgacaaccccttcttttgacagcgttgaagcgcaagcaagttacgggattggtttacaggtcggccagcagctgcaagagtccgggctggaaggtttgcaaccggaagctttgctggcgggtttgcgtgacgcgctggaagggaatgccccggcggttccggtagacgtggtgcaccgtgcgctgcgtgaaatccacgagcgtgcggacgcggtgcgccgcgagcgccagcaggcgatggcggttgaaggccagaaattcctggacgacaacgccaagcgcgatgacgtgacgctgaccgagtctggcctgcagttctccgtactggagcagggcaacggcccaattccgtcccgtcaggatcgcgtgcgtgtgcactacaccggccgtctgatcaacggcgacgtgttcgacagctcggttgaacgcggccagccggcagaattcccggtcagcggcgtgatcccaggctggatcgaagcgctgaccctgatgccggtcggctccaaatggcagctgtatatcccgcacaacctggcctacggcgagcgtggcgcaggcgcgtccatcccgccgttcagcgcgctggtgttcgacgtcgagctgctggaaatcctgtaatcccaccgaggattgttctgggcgccttcgtggcgcccttattttatgcgccgcgcagacgggcgatgaatggccgggcgcgccggccataaaccgtgttacttaccgcttaaatcgatgcgataaaccgcgaagccgatgctgtcgctgcctgcggcgctcatcggatattgggcgtgctctttgataaaccttgtcgctttgtccgaaggcgaggtctcgaagcggatatccagcggctgctggctgctgaagttcgccaaacgccagttgttgtccgcctgcgggcgcaccgcgccatgccgctgggtttcggcgctgatgtaggccgccagcaccgagcggttttcatccggcgaagcgaaggcgatatgttggtcgccggtgccggcaaatttgccgccgtaggcgcggtagttgttggtggcgaccaggaaggtggcgttcggatcgatcggcttgccgttgaaggtcaactgcttgatacgctccgccttgtcgttgatcagttggcattcgccgtcgtagcgcgccggctgactgacgtcgatctggtagttgacgccgtcgatcacgtcgaagttataggtacggaagccgtcccagttgatcaagccctgcggcttggcgctgttgacgtcgatctggttgaactgaccggcggagcactccagccactctttcacctctttgccgctcgccttcaccaccaccagcgtattggggtagagatagagatcggcggcgttgcggaaggtgagctggcctttttccacttcgacgaagctggcgggatcgttcttgcggccgccgaccttgaacggggccgccgccgacagcaccggcagatcggccaggtccgggtcgccctggatgtaatgttcgacgtaggctttctgcgcattgttgacgatctgcaccgtcgggtcgtcctgcaccagcgccaggtagctgtacatgttgccgtcggatttaccgatcggctggctgacgaactcgcgcgtgcccttgtgatcgtccgccaacactttcaccagcgcggcgtcttccgccgccagcgatttcttgttctctttgtcgtagatcggccgtgcttccgcgttggcggcggtcactttccagctgccgccatcgttgttgagctgcaggtcgaccacgccgagatgatcgccccattggcccggcatcaccgccggcacgccgttcagcaggcctttgtcgatatccgcgcctttgatgttggcaaagtccttgctcgggaacaccgcatgggcgtggccgaacatgatggcgtcgatgcccggcacctggctgaggtaatagaccgagttttccgccatcgccttgtaaggctcgctggacagcccggaatgagggatcgccaccaccagatcggcgccctctttacgcatctgcggcacgtagcgcttggcggtggcggtgatgtcgtccaccgtcactttgccctgcaggttggccttgtcccacaccaggatctgtggcggcacgaagccgatgtagccgatgcgcagcgtatgcgccttgccgtcgcgatctttcaccggcgtatcgacgatgatgtacggcgtgaacagcggtttttgcgttttggcgtcgatgacgttggcgttgatatacgggaatttggcgcccgcgatagcgttcttcaggtagtccagcccatagttgaactcatggttgccgatgttgccgacgacgtagtccagcgtgttcatcgccttatagaccgggtgcacgtcgcccggtttcagccccttggccgccatgtagtcgccgagcgggctgccctgaatgatgtcgccgttgtccaccaacaccgcgttggcggcctgctggcgcgcctgttggatcaggctggcggtgcgcaccaggccgaacttgtcggtcggtgtgtccttgtagtaatcgaagtccatcatgttgctgtgcagatcggtggtttccagcacgcgcagatcgacggtggccgcttgcgcggaggcgcacaccagcagcgcaagcgcggacagcgtcagtggatgcttcatcatttgggattctctccattccattattcgagtgttatcgcagagggaaatgtaattaacattgcttgccacagtaaactgtgaagtgtggcagaaaatggcggcgggtaacgcggggaagttcacagttgtgcccaacaagaaatgaggaattcccgaggcttaggcggttgagatggatattcggcgtaaaaaaaactagtctgctagcagagacagggggaaatttcccacggagatgcggagttgaggtgcatgatgttagagcgaatttgccaactgtcccgcgaggcgggggcggcgatcatggcggtgtacgatggtgaacaaccgcttgatgtcgcacagaaaaaagatgattcaccggtgacggcggccgatctggcggcacaccatatcatcaagcgcggcctggcggcgctgacgccggaggtgccgctgctgtcggaagaggatccgccggcgtgggaagagcgccgcggctggacgcgctactggctggtcgatccgttggacggcaccaaagagtttttacatcgcaatggcgagttcacggtcaatatcgccctgattgaagatgggcaggcggtgatgggggtggtgtatgccccggcgatcgacgtgttgtatctggcggagcgcggtaaggcctggaaagaagagaagggcgtgcggcaggcgatcggcgtcagcaacgcgcatccgccgctggtggtggtgagccgctcgcatatcgatgacgaactgaaagattatttgcagcagttgggcgagcaccagaccgtgtcagtcggttcctcgctgaagttctgtctggtggcggaaggcaaggcgcagctctatccgcgcttcgggccgaccaacatttgggataccgccgcagggcatgcggtggcggtggccgccggggcgcaaattcacgattggcagggtaagccattgctctataccccgcgtgaatctttcctcaaccccggcttccgggtgtcgctgttctgagttagttcgccaacagctggtgcagcttggacatcacctgctgcacctcttccggcgtcagcgcgccgtctttggcgaactggatgcgcccttgcttatccagcaccacgatggcggagcctttcggctgcagatcccaggctttgcgcacgttgccgtcgctgtcgacgataaactgcgaccatgggaactccttcttgctgtcttcaatgctgctgcgcacgaacatcgcggtgcccatcagggcatcgtcggtgttgacgattgtcgtcgtttggtaacgatcgtgtggtagcttcgccttcttgatcgcttcaatcagtgggtcgttcatgtctttggcggagctgcggccggcaatatgttgtatcactcgcacttttccactgagctgcgcgctgttccagttctggtagctaaaattaccgtcagtgtaattgagctctcctttgtcgctgacgccgaccggcgccacgcgctgctggagctggaagttgtgcgcggaagcgaaaagcggggcgagcagcagggataccatcagcatgcgacttgttttcatgctttctccttgtaatggggggaatttgtgcgacagcacttcgacagcctaaagcataggatgtgataagaggtctgtcctgttaaccggatcgcagattttcccttggttcgctaatcatcagattttgaagggatatcctgaaaacgttataaattatcatatacaattctgtcaaaaagtgtaaatccagcgtagatatccgggcagaagtgaacgttctggtctttactgggtctactacatgcaatcaagttgcgttctgaatttcgaggctgccacctttggcggctcgctgagcgcatggatcaacgggaggagcgtaaaagaatgagaatcttccagcgttataaccctttgaaagtggcaaagtacgttaagaccctgtttcgcggaaggctgtatatcaaggacgtgggcgcatttgaattcgacgaggggaaaatcctgccgccgaagattcgcgacaagcgccatttcagcgtgatgtctgaagtgaaccgtcaggtgctgctgttgcagaccgagatggggtgagcacctcgctgacagcggtaaaaaaaatgcggccccgatggggccgctgatgtttttgtcttaccgccgtcaggccgcaggcgtgtcgtccggcgctttcggcagcaccgccgccggcttgtcgctcagccgggtgaccagcaactggtctatcttgtagctgtcgatatccaccacttcgaacttgtagccggcgtatttgacgaagtcggtgcgtttcgggatcttgcgcagcatatacatcataaagccgccgatggtctcgtagttgcccgcctgcgggaactcgtcgatatccagcacgcgcatcacgtcgtcgatcggcgtgccgccttcaatcagccatgaactttcgtcgcgcgccacgatctgctcttcctggccctggccgaccagatcgcccatcagcgtggtcatcacgtcgttaagggtgatgatgcccaccaccaacgcatattcattgaggatcaccgcgaagtcttcgccggcggttttgaagctttccagcgcttcggacagcgtcagcgtgtccggcacgatcagcgccgagcggatctgcacgccgctgctcagcaccaggctttggttgcccagcacgcggttcagcaggtctttggaatcgacgtagccgaccacctgatcgatatggccgtcgcacaccaggaacttggagtgcgggtgagtcgagaccttctccttgatgctctcttcgctttcgcgcagatcgaagtacaccacgctttcgcgcgaggtcatcgaagacggcacggtgcgcgattccagttcgaacacgttttcaatcagctcgtgctcctgcttgcgcagtacgcccgccagggcgccggcttccaccaccgcatagatgtcatcggaggtgatgtcgtctttacgcaccatcggcagcttgaacatacggaagatcaggttggccatgccgttgaagaaccacaccagcgggcggaagatcatgatggagaaacgcatcgggttgatgatccggacggcgaccgtctctggtgcaatcataccgatgcgcttcggggtcaaatcggcgaacaggataaacaggctggtcaccagcacgaaagagcagatgaagctgacctgttccgccaattcgggcgacaggaaacgatcgaacaacaccttgaaagtgggcgagaaagccgcgtcgccgacgataccgccgaggatggccacggcgttcaggccgatctgcaccacggtgaaaaagatgccaggggtttcttgcagcttgagcactctggcggcgttgacgttaccttcgtcagccatcagcttcagtttgatcttgcgcgaggcggccagagagatttccgacagtgagaaaaacgcactcaccgcgatcagaaaaagaatcagtaaaatactgtttaacataatctatccatacgtgccgacgggatgccgacgctcttgaggaagggtagtacatagtaaaaaaagcagcgataacaaccagaagggaagctatcgggccgcagaagcggcccgcatagtatagcagttgccccacaggggccgccagcggttaaaaaagtgccgccggccggcatcaaatcagccctgcggcggcaggcaaacgccgatgccgcccagcccgcagtagccttccgggtttttgaacaggtactgctggtgatcgtcttccgcatagtagaacggcagcgctggtgcgatctcggtggtgatggcgcgcttatcgcccgccgcatccatcgcctgctggaagcgttgcaggctgctttccgcctcggtctgctgctctgggctcagcgtatagatcgccgagcggtactgcgtgccgacgtcgccgccctggcgcatgccctgcgccggatcgtgattttcccagaacagctgcagcagctgtttgtagctgacgacctgcggatcgaacaccacgcgcaccacttcggcgtggccggtctggccgctgcacacttcgcggtaggtcgggttcggcgtatagccgccgctgtagccggcggcggtgctgtagacgcccggctgttgccagaacaggcgctcaacgccccagaaacagcccatggcgaaaatcgccacctccatgccggccggcacctgagtcatcgagtgttcggtgacgacgttgagcgttgcgacaggcattggcgtggtgcggccaggcagcgcgcttgccttatcgacggtttgtgatttatcaaaaaatggcaccacggttgactcctgttgtcacagtaagaattgaccctacatggcggcggttcggttgtatctcaccgcgtctttgcccacaataagcggcaagttggattttgtataagcttaacgcagtattttgagcgccaaaagtgaagaattcgcctgttgcgcggtagtggcaaagcgcggcgggcggcgtccggaagaaggttgaagagggctgccgtcatgatagcgcggagtctgccctggccccggagcgaacaccataacaggacagtaaaatcaataaggagaacacgtgccaaagtacccggtcatgtgcttgatatctgtgttgcttgcggcacctgcagcctatgcggcgaacgtgcggctgcaggtggaggggttaagcggagagttggaaaaaaacgtccgggtgcggttgtcgtcgatcacgcctgaagaggtcggcaccgacggccgcttccgcgcacgggtggacgaggcggtgcgccaggggctgcgcgcgctcggctattaccagccgaccatcgagtttacgctggacgatcggccggggatgtcgcgcccggtgctgcatgccaaggtcaatccgggcgagccggtgcgcatcgccggcgccaacatcgtgctggaaggtggcgcaaagaccgatgaggactacctgacgctggtaaagaaggatcggccgaccatcggcgagatcctcaaccacggcaagtatgacagtttcaaaggctcgctgaccggcctggcgctgcgcaaaggctacttcgacgccgacatgaccaaaagccagctcggcgtggccgaagatctgcacaaggcgttttgggatatcgattttaacagcggcgaacgttaccgcttcggcaaggtgaaattcaccggttcgcaaatccgcgaagactatctgcaaaatctggtgccctttcatcagggggattactacagttcggaggatttggccgagctgaaccgccgtttgtccgccaccaactggttcaactcggtggtggtgtcccctgatttcaacgatgccaaagagaacaagattttgccgttggacgcgctggtgaccccgcgcacgcgcaacaccgtcgaaaccggtatcggttattccaccgacgtcggcccgcgggtgaaaggcacctggaaaaagccctggctcaacgatcgcgggcatagcctggaaaccagcgccagcgtgtcggcgccggagcagcagctggatctgacttacaagatcccgctgctcaagaacccgctggagcagtattacctgctgcagggcgggctcaagaacgtcgatcttaacgacaccaaatccgtgacctccaaagtggtggcctcgcgcaactgggatctctccagcggctggcagcgggcgatcaacctgacctggcgctgggataactttacccagggcaacgtcagcaacaccaccatgctgctgtaccccggcgtcagcttcaaccgcacccgttcgcgcggcgggctgatgccgacctggggcgacagccaacgctattccatcgacgtgtccgacacttcctggggctccggcgtggacttcgcgctgatgcaggcgcagaacgtctggatccgcaccttagccgacaagcatcgctttgtagcgcgcgggcaggtgggctggatcgaaaccaacgacttcgacaaggtgccgccggatctgcgcttcttcgccggcggtgaccgcagcattcgtggctacaagtacaaagacatttcgccgcgcggcgacgacggcaagctgaccggcgcttccaagatgctgaccggctcgctggagtaccaatacaacgtgaccggcaaatggtggggggcgatgttcgtcgattccggtgaagcggtgaacgatatcaagcagagcaacttcaagaccggcgccggcgtaggcgtgcgctggcagtcgccggtggggccggtgaagctggatatcgccgcgcccgtgggggacaaggacacccacgggatgcagttctacatcggtttggggcctgaactatgagcttggttaaaaagatttgcctcggatttctggtcattctgctgttgctgatcggcggcctggccttcctggtggggaccaccaccggtttgcatatggtcatcaacggcgcggcgcgctgggtgccggggttggagatcgccggcgtcagcggcggctggcgcgatctgacgctgaagggcgtgaagtatcagatgccgggcgtgacggtcaatgccgggcagttccatctctccctcgatctctcctgctttaaacgcagctcgctgtgcgttaacgccttgaccgctcaggacgtggacgtggcggtgaacaccaaagagatggcgccctccgcgccggtggaggagagcagtgaaccgaccaccaatctcagcaccccttatccgatcaccctgcgcctgctggcgctgaataacgtcaaggtcaccgtcgacgacaccgccatttctctggccgagttccgcaccggcgcgcagtggcaagagcgcgcgctgacgctgatgccaaccaagatcggctcgttgctgatcgccttgccgaaaacgccgcaaaatccgttgccggaagcggtgcaaccggcggtcgaggtggcgaaaaaggtcggtgagcaggttaccgacgcggcgaaaccggcgccgcagccggaggagaagccgctcggcgaaacgctgaaggaactgttcgccaaaccgctgttgccggatctgccggacatccgcctgccgctggatatcaccatgaaagagatcagcggcgaacagctgcgcttgaccggcgatactgacgtgctgatcacgagcctgttgctgcaggccagcacgcaggatcagcatatccagctggacaacttcgacgtgaagtcgccgcagggcacgctgtcggtgcaggggcaggcgaccctgaccggcgactggccggtggcgctgaccgccaacagcgcgttgaatatcgacccgttgaagggcgagaaggtgaagctgaacatcgacggcgggttgcgtgatgagctgaaggtggcgctgaacctgtccggcccggtcggcgcccagctcgatgtgcaaacccggctggccgaagccggcctgccgctggcgctgacgctgcagagcaagcagctgaaatggccgctgagcggcgaggcgcagtaccaggtcaacgatttccgcctgcgctttaacggcaaggcgaccgactatgcgctgtcgacgcgcgccaatctgaaaggccaggatctgccgccggcggtgctgacgctggacggcaaaggcaacgtcgagcagttcaagctggagcgcctgcgcctggcggcgctgcagggcaataccgatctcaccgcgctggtggactggagcaaggccatcagctggacctcgcaattgacgctgagcggcatcaataccgccaagcagtggccggaatggccagcgaaactcgacggcaagatcaccacgcgcggcagcctgcacggcggcagctggcagctgcaggtgccggtgctgcagctggacggcaacgtgaagcagaacaaggtcacggcgcgcggcacgctgagcggcaacgccgccgggcagtggaaaatccccggcatcgatctgacgctggggcgcaaccagctgaacgtcaaagggcagctggacgagaagagctggaacctggacgccaacatcgacgcgccgcgtctggacggcgcgctgccgggcctcggcggcaccgccaaaggactgctgaagctgcgcggcaatctgcaggcgccgcagctgctggcggatttgaccgcttccggtttgcagtggcaggcgctgcgcatcaaccgcgtgaagatcgacggcgacgtgcgttccacggatcagatccaggggcaactggcggtacgcgtcgagcagctgaagcaggacgcgctggaggtcagcctgctgaccctcgacgccaaaggcagcgagaagcagcatcagctgcagttgaagatcgacggcaaaccggtctccggccagctggcgctgcagggcagcttcgatcgtcagcagcagcgctggcgcggcaatctgaacaatacccgcttcgatacgccggtgggggagtggcgcctgacgcgcgccatcgtgctggactacctgaacaccgcgcagaagatcagcgtcgggccgcactgctggcagaacccgaacgccgagttgtgcgtgccgaagaccatcgaagccggccagagcggccaggccagcgtggtgctcaaccgcttcgatctggcgatgatcaagccgttcctcggcccggagaccgccctgagcggcgtgttcaccggccgggccgacgtcagctggaaaccgggcggcgcgctgccggaggcgaaggtcacgttggccggcaacggcgtcaaggtggtgcagcaggtgcagggcaatgcgctgccgatcgccttcgatacgctgaccctcaacgccggcctgaacaacggccgcgcgcaggccgactggcggatcaaactgaccaacaacggccagttcgacggcaatatccaggtggcggatccgcaggtgcggcgcaccatcagcggcaacgtcaatatcaccaacatttcgttggcgctgattaacccggcgctgatgaagggcgaaagcgcggcgggcatgctgaacgccaacctgcgtctgggcggcagcgcgcagaagccgctggtgttcgggcgtctggcgttggatcgggcgaaggtgcaaggacactggatgccgttcgatatgaccgacgcgcggctggcggtgaatttcaacggcatgacctcgacgctggaagggctgctcagcaccacgcgcggccagctgaatctggcgggcgacgccgactggcgtgacatcaatgcctggcgcgcgcgcattgccgccaagggcgacaagctgcgggtgacggtgccgccgatgatccgcatcgacgtatcgccggatctggtgttcgaagccacgccgcagctgttctcgctcaacggcaaggtcgatattccctgggcgcgcatcacggtgcaggaactgccggaaagcgcggtgggcgtctcttccgacgaggtgatgctggacgatcagctgaagccgattcaaccgaagaccgcctcgatcccgatcaacagcaatctgatgatccacgtcggcaacgacgtgcggctggacgccttcggcctgaaagcccgcctgaagggcgatttgaaagtggtgcaggacaagaaagggctgggcctcaatggccagattgacatcccttccggtcgcttccatgcttatggtcaggatttgatcgtgcgtaaagggcagctgatgttctctggcccgccggatcagccgctgctcaatatcgaggcgatccgcaacccggaatccaccgaggacgacgtgaccgccggcgtgcgcgtgaccggcctggcggatgcgccgaagctggaagtgttctccgatccggccaaatcgcaacaggaagccctgtcttatctgctgcgcggtcagggcttaagcagttccggcgccgacggcaacgccatgacgtcgatgttaatcggcatgggggttgcacaaagtggtcaacttgtgggtaaaatcggcgaggcattcggcgtgagtaatttggctctggacactcaaggggttggcgacaattcccaggttgtcgtgagcggctatgtcctcccaggcttacaagtaaaatatggggtgggcattttcgactcgctggccacgctgacgttgcgttatcgcctgatgcctaagttgtatcttgaagcggtgtctggtctcgaccaggcattagatttgctctatcagtttgagttttagcgatgcgaataattgtctacggcagtttacggcgcaaacagggaaacagccattggatgaccaacgcccaatggctcggcgagcacgagctcgaaggctatcagatttataatctgggccattacccggcggcgatccctggagagggcacgatacattgcgaagtgtatcgtattaactcatcgattctggcagagctggacgaactgaaaagcaacaccaaggactataagcgcgagctgattcagacgccttatgggagtgcgtggatctacctgtataaacacagcgtggacggttacccgcgaattaccagcggtgactggctgaaacgcctcgaagatcagtaataaaaaaacaccgctcaatgagcggtgttttttcatcggacggcggcgaaaattacttcttggcggcgcgttcgaaggaggcgatgatttccgctttagcggcagcagcgtctgcccagccttccactttcacccatttgcctttttccagatctttgtagtgctcgaagaagtgagcgatctgggctttcagcagttccggcaggtcgttcacgtctttcacgtgatcatactctttggtcagcttgctgtgcggtaccgcaaccagcttggcgtcttcaccggcttcgtcggtcattttcagcacgccaaccggacggcagcggatcacggagcccggctgcagcggatatggggttgggaccagcacgtcaaccggatcaccatccagagacagagtgtggttgatgtagccgtagttgcatgggtagaacatcgcggtggacatgaaacggtcaacgaacagcgcgccggtttctttgtcgatttcgtatttgattggatcggcgttggccgggatttcgattactacgtagatgtcttccggcaggtctttgccagctgggaccagattcaagctcatgtcggtttcctttaatcatcaaaccagaaatggagtggcggctattatagcggactcttttgcgatttcctgcccttttcatcgtcgaaaacccagtgtctctgcgcgcggagaatttccagattaatcccgccgcggcatgaagttttgcctccgcctgccgataacttcaacaaacaataatgagccagcaaagctggctccgcgttttgccacccctactacgtctgatctcactattctgaagccgggaagaactcatgctaaaaaagattacggtgaaggctgggctgatcgccctgctgagcctgatgaccatgctgctgatcatggtcagcgttattggcgtcaacgcgattaacgaaggatcgcgctcgatccataccttgaaccagatcctcggcgaagagctgggctcgctggccaacagctccaacctgacgctgcgcgcccgaaccgccgcttcgctggcggtgcgccaacgggagatcggccagactgatgtcgccgacgccaccgtcggccgcatctacggctacctcgagcagtcgaacaaggaaatggcgcgctttgtcggcgtcggcaccgtgaccgagcgcggccgcgaactctccaaccgcctgcaaaacagctatcgcgcctatctggagcagggcgtgaagccgatggccgccgccatcaaggccggtaaaatcgatgagtactaccatattcaggagacccgtatctctgcgttaagcatcgcgtttgaaaaggatctcagcgatttccgcagcttcgccatgaagctcggcgagaagcaggtgtatgacgcggaaagcaacgccagcaccaagatctcgctgatcgtggtggcgggcctgctcagcgtgctgctggcggtgctggcctggtttgcgttgcgggtgatcattttgcgtccgctggatgagtccatcgcgcagctggaatacatcgccggcggcgatctgacccatgagatccgcggcgagggcgataccgagatgggccgcctggtgcgggcgatgcagcgcatgcagcaggcgctggccaattcggtcagcaaagtgcgtgacgccagcagccagatcgacaccggttcacgcgaactggcggccggtaacctgcatctggcgcagcgcaccgaagaatcggccgcgtcgctggaagagactgccgccagcatggaacagctgacctcgacggtgaaaatgaacgccgagaactgcgagcaggctaatcagctggcgctgagcgtgtccgatatcgccaaccagggcagcgacgtggtcagtcaggtcatgagcaagatgcaggcgatcaccgacagctcgcgccgtattgccgacatcatcagcgtgatggacggcatcgccttccagaccaatatcctggcgttgaatgcagcggtggaggcggcgcgcgccggcgaacagggccgcggtttcgcggtggtggccggcgaagtgcgcaatctggcgcagcgtagcgcccagtcggcgaaagagatcaaagggttgatcgaagcgtcgcagaaccgggtgcaggaaggcgagcagatggtggagtcggcggcgcagaccatgagcggtatcaccggtgaagtgggccgggtgacggcgttgatgcgtgagatctcggcggcgacgcgcgaacaaagcagcggtatcgaacaggtgaatctggcggtggcgcagatggatcaggtggcgcagcagaatgcggcgctggtggaagagtcggcggcggcgacgcgctcgctggaagatcaggctcagctgctggcgcagagcatggcggcgttcaagctgtaaggcgataagggttcggcgcggcgccgaacccttgccagtaacgcgttactcgtccgggttttcggcgatgaagcgttctgcgtcttctaccatcgacttggtgccgacgaagaatggcgcgcgctggtgcagtttcaccggcgtgatgtccagaatgcgatttttgccgtcgctggccttgccgccggcctgttcggccaggaacgccatcgggttgcattcgtacagcaggcgcagcttgccttgcgggtggctggcggtgcttgggtagatgtagatgccgcctttcagcaggttgcggtggaaatccgccaccagagaaccgatgtagcgcgaggtataagggcgctgcgtcgcttcgtcctgctcctggcagtacttgatgtatttcttcacgccgagagggaacttgatgtagttgccttcgttgatggaatacatgttgccgctcgccgggaagcgcactttctcgtgagagagacagaacacgcccagagacggatcgtacgtgaaggcatggacgccgtaaccggtggtgtacaccagcatggtggacgagccgtaaaccacgtaacccgctgcgacctgggcgctgcccggttgcaggaagtcttcttcggtcaccggcgtgccgaccggcgtgatgcgacgatagatagagaaaatcgtaccgaccgagacgttgacatcgatgttggacgaaccgtccaacggatccatcaatacgacatacttggcattttcagctcgctcgccgtcgaatatcacgatttcatcttcttcttcggaagcgatacccgcaacttcaccgcgcgctttcaacgccgctttcagtttttcgttcgcgtacaggtccagtttcatctgaacttcgccctgtacgttggacaccccgctggttcccagaatatcaaccaggccggccttgttgatgtcgcggtggatgattttggcgcccagtttaattgcagaaagtaacgcggtcagctcgccggtggcgtgagagaagtcgtgctgtttctcgacgataaattcgcctaacgttttcatgacacaatccctgaatctacggatggatagcggcctgttaacaaaccgccaacgttttcgcgtgcagtgtagcccaaagatgcgcgccattcataggcaaatccatttcttctggacgattctgagcgttagaatatgccgacattcgatgcactcacatgagaaacctatgcgcattcacattcttgggatctgtggcacctttatgggcgggctggcgatgctggcgcgctcactggggcatgacgtcaccggttcggacgccaacgtctatccgccgatgagcacgctgctggagaaccaggggatcgatctgattcagggttatgatcccgcccagctggatccggcgccggatctggtgatcatcggcaacgccatgacgcgcggcaacccgtgcgtggaggcggtgctggagcgcggtatcccttacgtttccggcccgcagtggctgcacgacgccgtgttgcgcgatcgctgggtactggcggtcgccggcacccacggcaaaaccaccaccgccggcatggcgacctggatcctcgaggcctgcggctaccagccgggcttcgtcatcggcggcgtgccgggcaacttcgacgtctcggctcgcctcggcggcagcccgttcttcgtgatcgaggccgacgagtatgactgcgcgttcttcgacaagcgctccaagttcgtgcactacagcccgcgcacgctgatcatgaacaacctggagttcgaccacgccgatattttcgacgatctgaaagccatccagaaacagttccaccacctggtgcgtctggtgccgggcaaaggcaaaatcatcctgccggacaacgacagccacctgaagcaggtgatggcgatgggctgctggagcgaacaggagctggtgggcgaagagggcgcctggcgcgcgcagaagctgacgccggacgccagccattacgcggtgttcctcgacggtgagcaggtcggcgaagtgaagtgggcgctggtgggcgagcacaacatgcataacggcctgatggctatcgccgcgactcgccacgtcggcgtgcagccggcggacgcctgccgcgcgttgggcgatttcatcaacgcccgccgccgcctggagctgcgcggcgaagccaacggcgttacggtttacgacgatttcgcgcaccacccgacggcgatcctggccactctggccgcgctgcgcggcaaggtcggcggtacggcgcgcattctggcggtgctggaaccgcgatccaacaccatgaaaatgggcatcagcaaaaacgatctggcgccttcgctcggccgtgccgacgaagtgttcctgttccagccgcaccacattccgtggcaggtcgcggaagtggcggatgcctgcgtgcagccggcgcattggagcgcggatctcgacacgctggtggacatggtggtgaaaaccgcacagccgggcgaccacattctggtgatgagcaacggcggtttcggcggtattcacgatcgcttgctggacgcgctggcgaaaaagcaggaaccgaaggtgacctactgatcgcttagccgcataagccaatctaagggccgcattcgcggccttttttacgcccataaaaaagccctcgcgagcgagggcaacggggttcgtcggataggacgacgagagggtctctgggaaatcggcgtttgcgtcagaactcggcagtggcagtgacgagggtaatcagctctgcaaagccgttcccagagttgttatttgtaaatctcggcggtggcgtggtagttgccttcgttacgggcttcgatcacgcggtaggcggtcgcgcctttcgcgtcggctttctccgacaacgcctggcgaatgtcggtcggcgcgccgtcgatgccgctgacggtaatggtgccgatagattgcagattggcggtctgatcgttagtcaccaactgggcggcagacgcgccgaaggagatgacggataacaaaccgagtgcagcaacagtagttttcatgttcatgatagcgatccttggtcataacagcctggaagggcttggcagcgatttttattcttgaaggccgttatgacagcgtttgattccagagatgtattgcccgttgccgggtaatgccgttacttatttgtagatttcagcggtcgcgtggaagttgccgtcgttgcgcgcttcgatcacgcggtaagcggtcgcccctttggcgtcggctttgtcggacagtgcctggcgaatgtcggaaggcgcagcggcgacgccgctcacggtgatcacaccggcgggctgcagttttgcggcttgggttgcatcaacagattgtgctgcgaatgcaccaaaggaaagcatggacagaacgctcagggttgcaacggtagctttaattttcatcatctcacctcatcgtattcttttatcagttccaacgaactgtgattcagttcacgaaaatgagtatacagctagtaacgcgaaaaattaatagttcgctaacagttgctagtgaaactttaacctcatgatccttattttttataaccgtaaggaataaaaaacgctcataaaacgatcttttgatgttaaatttatgtaatttcaataaggtaagtgattttgaccaaaagtgcggaagatcacagtgggtactgctggttacatggagatgtcatggaaatgtgttgttgcgggataaaaaagcagtgttaaacgcggttgaaggctgggaaggtaacgcgagggttaaagaagcgctaacaacatgcggtttacagccgcactttgttagcgccaggtttcacagctcttgttcgaacacgcccaagatcgcttcatgcagcttctgagcggtaaagccgttggacggggtgacgaaaatcgtgtcgtcgccggcaattgtgccgaggataccctgggatttacccagtgaatcgagcaggcgggcgatcagctgtgcggcgcccgggctggtgtggatcaccacgacggcatcgttatggtcgacgtcgagcaccagattcttcaatgggctggtggtggtcggcacgccgagttcggcaggaaggcaatacaccatttccatttttgcattgcgcgtacgtaccgcgccgaacttggtcagcatgcgcgatactttggattggttaatgttttcgaagccttcttcttgcagcgccaaaacgatctcgccttgagaactgaatttttcttctttcaataacgctttgaacgtcttgatcagatcttcctgttttgcgggattacgcattttgcaccgtggaatgttgatagtggaagtcatgattatgcatatagatgaatttttatgcaacaaaggccgccccaaagaaaataaaaatgaccggacggcgaggaaagggcggcattttaacaaaatccggccgcgatgaatatgcccttttgacgacggaaaatcggcctgcggtggtaaataaaatgttattaaaatgatgttgttctgatgttgcgtaagggtgtaatgtaacggccggttaacttgctcgtgaataacctcgcactttttttgattagtgtgcgctatgcccttcatgcgtaagcgatttaatctaaaatgggcgcgacagcggccgttttattacacctgcaggcaagaattggctaatttattgttttgaaaggtgtaataacgtaaggtccgtaaccaacacattcacggcgctttatatatttaagataataaaggagtataggatgaaagttgcagttctcggtgctgctggcggtatcggccaggccctcgcccttctactcaaaacccagcttccttcaggttctgaactctctctctacgacattgcccccgttaccccaggcgttgccgtcgacttaagccacatcccaaccgcagttaaaatcaaaggcttcagcggcgaagacgcgactccggctctgcacggtgcggacgtggtgctgatttccgccggcgtggcccgtaagccaggcatggatcgctctgacctgttcaacgttaacgccggcatcgtgcgtaacctgattgagcaagtggcgaaaacctgcccgaaagcctgcatcggcatcatcaccaacccggttaacaccacggtcgccatcgcggcggaagtgctgaaaaaagccggcgtttacgacaagaacaaactgttcggcgtgacttcgctggatatcatccgttccaataccttcgtggccgagctgaaaggcaagcagcctgaagaactgaacgtgccggtgatcggcggccactctggcgtgaccatcctgcctctgctgtcgcagatccctggcgtgagcttcaccgatcaggaagtggcggatctgaccaaacgtattcagaacgccggcactgaagtggtggaagccaaagccggcggcgggtctgcaacgctgtccatgggccaggcggccgcccgtttcggtctgtctctggtgcgtgcgctgcagggcgagaaaggcgttgtggaatgcgcttacgttgaaggcgacggcaaatacgctcgcttcttcgcgcagccgctggtgctgggcaagaacggcgttgaagaacgcaaagatatcggcaccctgagcgccttcgagcagaaagcactgaacgagatgctggacgtgctgcataaagatatcgaactgggcgagaagttcatcaataactgatcgacaccgatagtcagccgataaacgccgccggacgctgttccggcggttttttttgctccgcgttcacgatttgatgcgtgctttgcgatccagcaggcaatcgctgtgcggatcgtaatagcggcttggccagatctccgaagggtggatgcctatcgcttcggcgatcagccattccccctttggccacgggcgcgacagcgcattggccagcgtcgatgagcttaatccggccttgcgcgacactgccgccagcgtggtgccctgcttgcgtagcgccgcgatgatatctgccggatgccaatctgggttccttgaattcatgtttacattccttttctgattagccaaagttgcgttagtggtataactaacgggtcatggttaagcgtttgaacaacgtgaaacgcttattaggaaacaagaataccattaaatttcctaaaaaatacccaagtaatttccaaaaaacgacattgtccactattgcccagagatgatggctatgaaaaacgagtggtttgccgccaaggaactgacaggcatcgcaggattaccctcctcaccacagggaatcaatctgatggcccgacgcgaaggctggatcagccgcaggcgtaaaggcgtgcagggaaaagcgttggagtatcatatcgacagcctgcctccaggcgtgcgtaacctgctggcgctgaaagaagacggggcgacatatgacgtagaacgccaggatccgttggcggtctggatcgagtattactaccatttgacggagagcgagcgcgagaaaatggtggctttcctgatgcgggaagggattggcggcctgctggcgcgtatcgacgaagagagcaatacctaggcaggcccgcgtgggcgggcctgatgaatgtattgcgaaattaaaatttcttaaaagtcgcgttgcactgccagatgcgccaggccttccagcgccgtgcggtgctccgaggccggcaagacctgcagcgcggcgatcgccttgtcggcttcttcctcggcgcgttggcgggtgtattccagcgaaccgcattgttgcatcgcctgcagcaccggctccagcaggtggcggccgttaccttgctcaatcgcgccgcggatcatgtcacgctgggcatcgtcgccgttgtgcatcgcgtgcagcagcggcagggtcggtttcccttcattcagatcgtcaccggtgtttttgcccagggtgctgccgtcggcgctgtagtcgagcagatcgtcgatcagctggaaagcggtgccgaggtagcggccataatcttgcagcgccttctcttgctcggcgttggcgccggacaggatcgccgacgattgcgccgccgcctcaaacagacgggcggttttgctgtagatcacccgcatatagctttcttcgctgatgtcaggatcgtgcacgttcatcaactgcagcacttcgccttcggcgatgacgttgaccgcctccgacatcagcgccagcacgcgcagcgattccaggctggtcatcatctggaaggcgcgggtatagataaagtcgccgaccagcacgctggcggcgttgccgaacgccgcgttggcggtggctttgccgcggcgcatatccgactcgtcgacgacgtcgtcatgcaacaacgtggcggtatgaatgaattcgatcagggcggctacggtgacgtgcttgttgccttcgtagcccaacgcccgcgccgccaggacggcgatcatcggccggatgcgcttaccgccaccgctgataatgtaatagccaagctgattgatgagcgtgacatcggaattcagctgttcgagaattgttgcgttcacggccgccatatcttgcgcggttaactcggtaatttgctctaggttcattgtgtttttttcagctgtgtttctcttcaccgcgttgagatcgctgctcacatcggtacatggcggtaactgtccctatgattgtacttgaaaaacggttcagataaacgccacgaaagaaactgcgctttttttcttcttttttctccttctggtcttattctgctcttgtcatgcgccgcttttttgcgtagaattcgcgccctattgtgaatatttatagcgcgctctgaactaacacagtcgggcacgcggaaagcggagttttatatgtacgcggttttccaaagtggtggtaaacaacaccgagtaagcgaaggtcagaccgttcgcttggaaaagctggacatcgcaactggtgaagcggttgagtttgaccagattctgatgatcgctaatggcgaagatatcaaaatcggcgttcctttcgtcgatggcggcaagatcaaagctgaagtcgttgctcacggtcgtggcgagaaaattaaaatcgttaagtttcgtcgtcgtaaacaccaccgtaagcagcagggccaccgtcagtggttcactgacgttaaaatcaccggcatcagcgcttaagttaggagagcggattaatggcacacaaaaaggctggcggctcgactcgtaacggtcgcgattcagaagctaaacgtctgggcgtaaaacgctttggcggcgaagcagtactggcaggcagcatcatcgttcgtcagcgcggcaccaaattccacgctggtaccaacgtgggttgcggcaaagaccacactctgtttgctttgaaagacggtaaagtcaaattcgaagttaaaggcccgagcaatcgtaaattcatcagcatcgaagctgaataatttttcgagccttacgaaatagatgtaagccccgcaattcgttgcggggctttttacatttatgggttgcctgagggttggcccgtcagcgttggcgaaggtgatatggatacgaagcagcaggtcggcgttggtatttctttggcgttaaccacggcggtttgctggggcgcgttgccgatcgcgatgaaagaagtgttggtggtgatggagccgtttaccgttgtctggtatcgctttaccatggccgccatcggtttgggcctgatccttgcggtgcgccgcaagctgccgccgctgacgatgttccgccagccgcgttggctgctgctgttggcgatcgcgacggcggggctgctgggcaactttgtgttcttcagctcctcgctgcaatacctgagcccgacggcgtcgcaggtaattggccagctgtcgccagtcggtatgatgttcgccagcgtgctgattttaaaagaacgcatgcgcatcacccaggtcattggcgccctgatgctgatttgcgggctgatgctgtttttcaacgtcagtctgatagagatcttcacccggctgacggactacacgctgggcgtcatgctgggcgtgtgcgcggcgatggtctgggtgagctatggcgtggcgcagaaggtgttgctgcgccggctggcttcgccgcagatcctggttatgttgtacactttatgtgcgattgcgttgttccctctggccaaacccgaggtgattttccagcttagcggctggcaattggcgtgcctgctgttttgcggcgccaacacgctgatcggctatggcgcgctggcagaagcgatggcgcgctggcaggcggcgcaggtgagcgcgttggttacgctgaccccgctgtttaccctgctgttttcagatttattggcgctggcttggccccaggcattcgccatgccgacgctgaacatcgtcggctatgtcggtgcgtttgtggttgtggcgggcgccatgttttccgcaattggtcaccggtggtggccgcgacgggcagacccccccctggttgctcctttgaagcagcccggtgaatgatttacggagacggtaaatgaagtttgtagatgaagcagcgattctggtcgttgcaggcgacggcggcaacgggtgcgtcagcttccgccgcgaaaaatatatcccgaacggtgggcctgacggcggtgacggcggcgacggcggcgacgtctacctgctggcggacgagaaccttaacaccctgatcgactaccgctttgagaagtctttccgcgccgaacgcggccagaatggccagagccgcgactgtaccggcaaacgcggtaaagacgtcatcatcaaggtgccggtcggcacgcgcgtgaaggatcagggcaccggcgagatcctcggcgacatgacccgccacgagcagaagctgatggtcgccaaaggcggctggcacggtctgggcaacacccgtttcaaatcttcggtcaaccgcgcgccgcgtcagaagacgctgggtaccgccggcgaagcgcgtgacctgttgctggagctgttgctgctggccgatgtgggcatgctggggctgccgaacgccggcaaatcgaccttcatccgcgcggtgtccgccgccaagccgaaggtggccgattatccgtttaccacgctggtgccgagcctgggcgtggtgcgcatggatcacgagcagagctttgtagtcgccgacattccggggctgatcgagggcgcctccgaaggcgccggcctgggtattcgtttcctgaaacacctggagcgttgccgcgtgttgctgcacctggtggacatcgcaccgatcgacgaatccgatccggtggaaaacgccaaagtcatcatcaacgagttgaaccaatacagcgaaaatctggcgcagaagccgcgctggctggtgttcaacaaaattgatgtgattggtgaggaagaagccgccgaacgcgccaaggcgattgtggaaggcatgggctgggaagggaagtactacatgatctccgccgccaaccgtgaaggcgtcaacgcgctgtgctgggacgtgatgaacttcatcaacacccagccgaaagcgatggcgatcgaagaaagcgcaccggaaaaagtcgaattcatgtgggatgactaccaccgcgagcaaatcgcggaagtggaagccgaagcggaagatgactgggatgacgactgggacgaagacgacgacgaaggcgtcgaaatcatttaccagaagtaattcggtgataaagggctcagcaacgctgggcccttattatttgagcgccttttccggcatccagcactgggcattcaggccgcgcgcatcgcggcggttttccagcgtcaaacgcccctggtgcagttgcgcgatgcggatcacgatattcaggcccagtccgctgccgccgtagcgttgatccatgcggcgaaacgcctgcgtcagctccccgaccatttcttccttgattcccgggccatcgtcgatgacctgcagcagatagccgttgtcttgcggcgttaaccgcacctgtatcgcgccgccttccgggccgtaacggtgggcgttttcgaccagattgcgcagcagcagccgcagcagcaccggatcgccgttcactgtggcagcagccggcaattgccagcccagcgtctgcccgcgttgggcggccatttcgtcgagctcttcgcgcagcggctggatcacatcggccacccaatcgaaatgctgataatggccgctggcgaagtcttgcccggcgcgcgacagcatcagcaactgctcgacggtatgcatcagctgatcgatgcgggcgatcagcgcctggctgcccttgacgccctgtttttccatcaattccagatgcaggcggatgccggccagcggcgtgcgcagttcgtgggcggcgtcggcggtgaacaggcgttcctgttgaatggtgttgtccaaccgtgagaacagctgattgagcgcattggtgacggccaccatttcctggctatcgctggtgatcggcagcggcgtcaggttatcggcagagcgcttttccagccgctgttgcagttggttgagtgggcggatgatccagctgatagcccagaatgacgccaacagggtgacgatcatcatgatcagcgaaggcgccaacagcgatgcgatggcctcggcgatctcggtatcgacgcgttcggtacgcactttggcggacagggtttcgtccaccaggaagctgatctgctcctggctttcgtgccacagccagaaggcgctgatgagttgcgtgaccagcaggatcagcgccagcatcagcagcaggcggcggcgcatgctgatcatgacgagggttccaggcggtagccgatgccgcgcacggtgcgaatgcgatccttgcccagtttgcggcgcaggttgtgaatatgcacttccagggtgttggaacctaaatcatcttgccaggtgtagagatcctgctgcaggagttcgcggttgaccgtctgcccggcacgcatgatcaggcgcgccagaatggcgaactctttcggcgtgacctccaccggctgctgttgcagatagacctgctggctggagagattcaactgcaggtcatccacctgcatcagattgtcgctgtggccctggtagcgccgcaggagagcgcgcacgcgcgcctgcagctcaaccagcgcgaagggtttgaccaggtagtcgtcggcgccggcgtccagcccatcgacgcggtcttccagggcgtcgcgggcggtcaggatcagcaccggcagatcgatctgctggcggcgccactgccgcagcagcgctgcgccgtccatgtccggcaggccgagatccaggatcaccatgctgtattggctggtgatgagcaggctgctggcctccgccgctgtggcggcgcagtcgcacacgtagccttcaccggtcagcgccagcgccagcccttgttgcagcagttcatcatcttcaacgaccagcagcttcatggcgatcctcagttgttttggtaaatatcccgatacaggcggctttcgaaacgcaccagcggtgcgcggcgctgtttctgatcttccggcggcacggcgtagccggagagatactgcacgaaggccatgcgctggccgctggcggtagtgatgaagcccgccaggttgtagacgccctgcagcgcgccggtcttggccgacaccttgccgtctacgccagcctcatgcaggccgccgcggtagcgcagggtgccatcatagccggacagcggcagcatcgagataaagttcagctcgttgtcgtgctgcgcgatgtactgcagcgcctgcatcatggtcgccggggccagcaggttgtggcgcgacaggccggaaccgtcggcgatgatggtgttgcccagatcgatgccggccttctggcgcagcacctgccgtaccgcatcggaaccggctcgccaggtgcccggcacgccgaagcgttcgtggccgatggtgcggaagacggtatcggcgatcatgttgtccgatttcttcagcatgattttcaacagatcgtgcagcggcgccgactgggtttgcgcgatcaccgtgccggtgatgccggggcgcgtctggcgtttcaaatgcccgtcgatctggatgtcggcctgcttcagctcgtctttcaggatggcgcccgcatagctggcgccgtcctggatggcgaaggccagcggcaacggctcgctgcgctgcgtcaggcagccggtcagggtaaagcggttcagctcgcccggcaccacatccagctcgcagtactgcgcgtctgcggagccgcgcgccagggtgcgcacctggctaaacatattaaccggataataggaggcgacgcggataaacgccatgtcgcccggattcggcgcgctgtacagcgagaccgagaaacagttgcgatcgacaatggcggcggccggcggcgcgctgaagcactgcgtcagatcgttccacggccagccgggcgccttgtcatggctggcgaagaccgaggtatcgaccagcacgtcgccgctgatttggcgcacgccctgcttcttcaggacggccaccatattgcgcaggctctggcgtttgaaggtcggatcgccgctgaagcgggcgatcaggttgccgcgcagcacgccgtcgcggatatcaccctggctctccagcgtggtggtgaaacggtaatcgggcccgagttgcagcaatgccgccagcgccgtcagcactttttgggtactggccggcagcgccatttgctgagagtggtaatcgatcgtcggcgcaccggcgccgatcttctgaacgaccagggcaaggttggccccatcaggcagatattgtgtgtactcttcaaccggggccgcattcgcattcagaacaaatgcgcaagccaatgcactgacaattcgtgaaaaacgcataatctcgggataacagctggataacgtgccgtcatactacggtgcaatcagggaaaaagtaaacgatgaccctcaaggaactctaggctaaaatgcgtatcaaaatgcaaaaccgatcttggcttgggctccgttccgagtcaggtttcttttgtttgtcgcctggaggcggggggcggtatgccaaccgtgttttcatacgaatacgtcaggatgacggttatttgaacaggaaagatttagaggtatttatacgatgaaccaaattccgatgaccttgtttggcgctgaaaaactgcgcgaagagctcgaatatctgaaaagcgtgcgccgcccgaaaatcattgcggatatcgctgaagcgcgtgaacacggcgacttgaaagaaaatgccgagtaccatgccgcccgcgaacagcagggtttctgcgaaggccgcattcaggaaatcgaagccaaactgtccaatgcgcaggtgatcgatatcaccaagatgccgaacaccggccgggtgatcttcggcgccaccgtatcggtgatgaatctggacagtgaagaagaagtgacttaccgcatcgttggcgacgatgaggccgatttcaagaaaaatctgatttcggtaaactcgccgatggcgcgcggcctgatcggcaaagagcaagacgatgtggtggtgatcaaaaccccaggcggcgacgtggaatacgagatcctgaaggtcgagtatctctgatcgggaccattggtcattaatgcgccaacgttttgtaaagataggaaaaaggccgcaagcggccttttatcttggtcaggcgcatggcaccttttcgttaacctgatggttattaacgcggtagactgatcttgcgctctttcgacgggcggtaaagaataagcgtactgccgataacttgcacattgcaggcgcccgtttcacgcacgatagcgtcggcgatcagggtcttggtttcgcgatcttcagcggcgatttttaccttgatcagctcatgatgctccagagcctgttcaatttcagccagcaccccttcggtaagaccgttattgcccagcatcaccaccggttttaacggatgcgccaggcctttcaggtgctgtttttgtttattattcagattcattgtcttttttgcttaagttgggattgaaaacggtacattctaccgccatctcatgtatatcaccaaatcggtcttcaccggtgtgagtctacgtgagcagcgaccctgacataagactctttttatgatagttggaaaacgagatggctaataaaaagcgttcggctagctccagtcgctggttacaagaacactttagcgataaatatgtacagcaggcgcagaaaaagggactgcgttcccgtgcctggtttaaacttgatgaaatacagcagagcgacaaactgttcaaaccaggcatgaccgtggttgacctgggcgccgcaccgggcggctggtcgcagtatgtggtcacccaaatcggcggtaccgggcgcatcatcgcctgtgatattttgccaatggatcctatcgttggcgtcgatttccttcagggcgattttcgtgatgaactggtgctgaaggcactgttggaacgagtaggcgagagtaaggttcaggtggtcatgtccgatatggccccgaatatgagtggcaccccggcggtcgatattccaaggtcgatgtatctggtggagttggcgctggatatgtgtcgtgatgtcctcgcaccaggcggaagtttcctggtgaaggtgttccagggagatggctttgacgagtacctacgggaaattcgctccctgtttacgaaggttaagattcgtaagccagacgcttcccgcgcccgttcgcgcgaagtgtacattgtagcgacagggcgcaaactgtagtaccctaacgctgtttgttaacacagttgtaagatgaggttaatcccttgagtgacatggcgaaaaacctaattctctggttagtcatcgcggtagtgttgatgtctgtattccagagctttgggcccagcgagtcgaatggccgtagggtggattactctaccttcatgtccgaactgacccaggaccaggttcgcgaagcgcgaatcaacggacgtgaaattaacgttaccaagaaagacagtaacaaatacacgacctacatccctgtcaacgatcctaagttgctggatacgttgttaacgaagaatgtgaaagttgtcggcgagccgcctgaagagccgagcctgctggcttctatctttatctcctggttcccgatgctgttgctgatcggggtctggatcttctttatgcggcaaatgcagggcggcggcggcaagggcgcgatgtccttcggcaagagcaaggcccgcatgctgacggaagaccagatcaagaccactttcgccgatgtcgccgggtgtgacgaagcgaaagaagaggtgagcgaactggtggaatacctgcgcgaaccgagccgtttccagaagctgggcggcaagatcccgaaaggcgtgctgatggttggcccgccggggaccggtaaaacgctgttggcgaaagcgatcgccggcgaagcgaaggtgccgttcttcaccatttccggttccgacttcgtcgaaatgttcgtcggcgtgggcgcatcccgcgtgcgtgacatgttcgaacaagcgaagaaagccgcgccgtgcatcatcttcatcgatgaaatcgacgccgtcggccgccagcgtggtgccggcctgggtggcggtcacgatgagcgcgagcagaccctgaaccagatgctggttgagatggacggtttcgaaggcaacgagggcatcatcgtcatcgcggccaccaaccgtccggacgtgcttgaccccgcgctgctgcgcccgggccgtttcgaccgtcaggtcgtggtcgggctgccggatgtgcgtggccgtgagcagatcctgaaggtgcacatgcgccgcgtgccgttggctgccgacatcgacgcctccgtcattgcgcgcggtacgccgggcttctccggtgccgatctggccaacctggtcaacgaagcggcgctgttcgccgcccgcggcaacaagcgcgtggtgtcgatggtggagttcgagaaagccaaagacaagatcatgatgggtgcggaacgccgctccatggtaatgaccgaagcgcagaaagagtcgaccgcgtatcacgaagcgggccacgccatcattggccgcctggttcctgaacatgatccggtacataaagtgacgatcattcctcgtggccgtgcgcttggcgtgaccttcttcctgccggaaggggatgcgatcagcgccagccgtcagaagctggagagccaaatctccaccctgtacggcggccgtctggcggaagagatcatctacgggccggaaaaagtctctaccggtgcgtcgaacgacatcaaagtggcgacctccatcgcccgcaacatggtgacccaatggggcttctccgagaagctggggccgctgctgtatgcggaagaagagggtgaagtgttcctgggccgctccgtggccaaggcgaagcacatgtcggatgaaaccgcgcgtatcatcgaccaggaagtgaagtcgctgatcgaacgcaactacacgcgtgctcgctcgctgctgatggaaaacatggacatcctgcactcgatgaaggatgcgctgatgaagtatgaaaccatcgatgcgccgcagatcgacgatctgatgaaccgcaaagacgtgcgtccgccggcgggctgggacgatgcgaacaaaggcaacagctccgacaacggcggcaccccgaaagccccgacgccggtagatgagccgcgcaccccaacgccgggcaacaccatgtccgaacagctcgacaagtaacaacggctgtgtaataacatcaaaccccggtacgccggggtttttttttgcccggcgggcagtgaaccaggcaacagtaaggtggaccaaccatgcagttaaccgtgcgcgacatgacgctcaatctctcccatccgcaggtgatgggcatcctcaacgtgacgccggattcgttttccgacggcggccgccacaacaccctgaaccaggcgctggtgcatgcgcatgcgctgatttcggccggcgccacgatgattgatatcggcggcgaatcgacaaggccgggggcggcggaggtgagcgaagaggaagaattggaacgggtcgtgccggtggtggaagcgctggcgcagcgcttcgaggtctttatctcggtcgatacctcgaaggcgggcgtgatccgcgaatcggcgcaggccggtgcccatctgatcaacgacattcgttcgctgcaggagccgggcgccctggcggcggcggcggaaagcggcctgccggtctgtctgatgcacatgcaggggcagccgcgcaccatgcagcaggcgccgcactacgacgatctgatcgccgacgttcaggcgtttttcgaacaccatatccggcgctgtaacgaggcggggataacaaatcagaaattgctgctcgaccccggcttcggtttcggtaaaaatttgtcgcacaactatcagcttctggctcggttgtcggagtttcatcgttttggtttgccgctgttggtcggcatgtcgcgcaaatcgatgattggacaactgctgaacgtgccgccggatcaacgggttatcggcagcgtggcctgcgcggtgatcgcggcgatgcagggtgcgcagattgtcagagtgcatgacgttaaagaaaccgtcgaggcgatgcgtgtcgtcgaggcaacactttcagctaagggacagtagagacatgagcgagcgcaaatattttggcaccgacggcatccgtggcaaggtcggggacagccccatcacgccggacttcgtgctgaagctgggctgggcggccggtaaagtgctggcgcgtcacggttcccgcaagatcatcatcggtaaggatacgcgcatctccggctatatgctggagtccgctctggaagccggtctggcggcagccggattgtccgcctccttcaccgggccgatgcccacgccggcggtggcttatttgacgcgtaccttccgcgcggaagcgggcattgtcatttccgcttcgcataacccgttctatgacaatggcatcaagtttttctcgatcgacggcgccaagctgccggacaatgtcgaagaagcgatcgaggccgagatggaaaagccgctgacctgcgtggagtcctcggagctgggtaaagccagccgcatcatcgacgccgccggccgctatatcgaattctgcaaaggcaccttcccgagcgagctgagcctgaaagggctgaaaatcgtggtcgactgcgccaacggcgcgacttaccacatcgcgccgagcgtgctgcgcgagctgggcgctacggtgatcgccatcggcgttgagccggacggcatgaacatcaacgagaaatgcggcgctaccgatgtgcgtcagttgcaggagcgcgtgctgcaggaaaaagcgcacgttggcctggcgttcgacggcgacggcgaccgcgtgatgatggtggatcacctgggcaataaggtggacggcgatcagatcctgtacatcatcgcccgcgaaggcctgcgccagggtcagctgcgcggcggcgcggtcggcaccctgatgagcaatatggggctggagctggcgctgaaacagctgggcattccgttcgctcgcgccaaagtgggcgaccgttacgtgctggaaaagctgcaggagctgggctggcgcatcggtgcggaaaactccggccatgtgatcttgctggacaaaaccaccaccggcgacggcatcgtggccgggttgcaggtgctgaccgccatggtgcgtaaccacatgagcctgcatgacctgtgcagcggcatgaagctgttgccgcagatcctggtcaacgtgcgtttcgccggcgatcacaatccgctggagtccgaagcggtgcgcaaggtcaccgaacaggtggaagccgagctggccggtcgcggccgggtgctgctgcgcaaatcgggcactgaaccgctgatccgcgtgatggtggagggtgaggacgagcagcaggtgaccgcgctggcgcatcgcatcgccgatgcggtgaaatccgcaggttaaaacagacagttagccgccgggcttggcatcgctgagcccgaacaggcgattgttggcgtttttttccgcaaacgcgccggcggctgcaaattgcccttgcgcgggttggcggctttggttagtattcacacccgcttcagtaggcagtttataaacacgcctgcttgatgagtgtgaagcatttggcatgcggtgaggccgcaaggatacgggtactactatgtacgaagctcttctggtaattttcctgctgatttcaatcgggctggttgctctgattatgttgcagcaaggtaaaggcgctgatatgggagcctctttcggagcaggtgcatcaggcacgttgttcggttcgagtggttccggtaactttatgacccgcatgactgctgtattggcgacgctgttcttcgtcatcagcctgattctgggcaacctcagcagcaaccaaagcaagaaaggcagcgagtgggaaaacctcggtcagccggtgaaaactgagcagacaaccgcgccggcagcacctgccaagccgagcagcgacatcccgcagtaagccgcaaaaagtttgtaaacggtggttgtgaactcgaaagaacaacggccgttagcagtaagaatcagtaccgaggtggtggaattggtagacacgctaccttgaggtggtagtgccctaacgggcttgtgggttcgagtcccatcctcggtaccaaatcccagagataacttgcaattttgcgattatcggcgtagtatttgccacgttttcggacgcggggtggagcagcctggtagctcgtcgggctcataacccgaaggtcgtcggttcaaatccggcccccgcaaccactttcctttaagtgtttattttcaaatacacttttcgattgaaatccgcttttctcgatcaacatttgaaaatgacacttgctcgaaagttgtaccgaggccgcctagcggcaaacagggtccagttgcataaagccccgatttttcggggttttttgttatttggcaacagaatcactgggctatttagccctttttttatgtcttgggggtgggcttgtccacattagagcaacagttaacagagatgctttcggcacccgtagaagcgttgggctttgagcttgtaggcatcgaattcattcgtgcgcgccaatcgacgctccgcatctatattgatagtgacaacggcatcaatgttgatgattgcgctgatgtcagccaccaggtcagcgctgtattggacgtcgaagatccaatcacggtcgcttacaacttggaagtctcctctcctggccttgatcgcccgatgttcaccgcagagcactatacgcgtttcctcggtgaagaagtcagcctggtcctgcgcatggcggtacagaaccgtcgcaagtggcagggtattatcaagtctgtcgaaggcgagatgatcacggttactgtggaagggaaagatgaagtgttcgcgctgagcaacatccagaaagcgaacctggtaccccacttttaaagtttggaagaggcaactaggatgaacaaagagattctggctgttgttgaagcagtttccaatgaaaaatcccttccgcgcgagaagattttcgaagcgctggaaactgcattagccaccgcaaccaagaaaaaatacgagcaggaaatcgacgtgcgcgtcagcattgaccgcagaaccggcgatttcgataccttccgccgttgggtcgccgtagacgaagtgacgcagccgacgcgtgaaatcacgctggaagccgctcagtttgaagatccgagcatcgagctcggcggctacgtcgaagatcagatcgaatccgtaaccttcgaccgcatcaccacccaaaccgccaagcaggttatcgtgcagaaagtgcgcgaggccgagcgcgcgatggtggttgacgctttccgtgaacatgaaggcgagatcgtcaccggcgtggtgaagaaagtgaaccgtgacagcatcgcgctggatctgggcaacaacgccgaagcggtgattggccgtgaagacatgttgccgcgcgaaaacttccgtccgggcgaccgcattcgcggcgtactgtacgccgtgcgtcctgaagcccgcggcgcgcagttgttcgtcagccgttccagcccggaaatgctgaaagaactgttccgcatcgaagtgccggaaatcggcgaagaagtgattgaaattaaagcggcagcccgcgatcctggctcccgtgcgaaaattgcagtgaaaaccaacgacaagcgcatcgacccggtcggcgcctgcgtaggtatgcgcggtgcgcgcgttcaggccgtgtcgagcgagctcggcggcgaacgcatcgacatcatcctgtgggatgataatccagcgcaattcgtcatcaacgccatggcgccggccgacgtcgcgtcgatcgtggtagatgaagataactgcaccatggatatcgccgttgaagccagcaacctggcacaggcgatcggccgtaacggccaaaacgtgcgtttggcttcccagctgctgaaacaacaccgcggcgacgatcgttgggaactgaacgtgatgacggcggacgacctgcaggccaagcaccaggccgaggctcatgccgctattgataccttcaccaagtatcttgatatcgacgaagatttcgccaccgtactggttgaagaaggcttctccacgctggaagagctggcctacgtgccgatcaaagagctgttggaaatcgacggtctggatgaagatacggttgaagcattgcgcgaacgcgccaaagctgcattgaccacgctggccctggcacaagaagaaagcctgggcgacaacaaaccggccgacgatttgctcaacctgccgggtcttgagcgcagcatggcctttaaactggccgcgcgtggggtttgtacgctggaagatcttgccgagcagggtgttgacgatctggctgatattgaagggcttagcgacgagcaagccggcgagctgatcatggctgcgcgcaatatctgttggtttggcgacaacgcgtaataactgtagcaggaaggaacagcatgacgacagatgtaaccgtaaaatcgctggcagcagagattcagactccggttgatcgcctggtacagcagtttgctgatgcagggatcaacaagtccgagtcggactctgttacccagcaagaaaaagaaacattgctggcgcacctgaaccgtgaacacggcagcgcgccgggtaaactcactttgcagcgcaaaacgcgcagcaccttgaatatcccgagcaccggcggtaaaagtaaatcggtgcaaattgaggtccgcaagaaacgcacttatgtaaatcgcgatacgcaggaagcccagttggctgaagcggcagagcaggcacagcgtgaagcggaagagcaggcacggcgcgaagcggaagagctcgcaaaacgcgaagcggaagcgaagcgcgcagccgaagagcaagccaaacgtgaggccgcggagattgctaagcgtaattcagcggaaaaagaaaaagtgaccaatcaacataccgacgaaatgaccaagccagctcaggcggaaaaagcacgccgtgaagccgaagccgctgaactgaaacgtaaagcggaagaggaagtgcgccgcaaggttgaagaggaagccaagcgcgtggcggaagaagcccgtcgcatggccgaagagaacggcgagaagtgggcccaggcagacgcggcaagcgccgcggttgaaagcgccgactatcacgtgaccacctctcagcacgcccgtgccgctgaagatgaaaacgacgccaaagttgaaggcgatcgtcgcagccgcacccgcggcggcaaagccaccaagcagaagaaaggcaacaagctgtccgaatccaaagcggatcgcgaagaagcgcgcgccgttacccgtggtggtaaaggcaaacgcaagcctagcgctctgcagcagggcttcaacaagccggcgcaggtggttaaccgcgacgtggtgatcggtgaaaccatcaccgtggccgagctggccaacaagatggcggtaaaaggttctcaggtcatcaaagtgatgatgaagctgggcgccatggccaccatcaaccaggttatcgaccaggaaaccgcgcagctggttgccgaagagatgggccacaaagttatcctgcgtcgtgaaaacgagctggaagaagcgctgatgagcgaccgtgatacgggcgctgcggccgagccgcgcgcgccggtcgtgaccatcatgggccacgttgaccacggtaaaacctctctgctggactacatccgctccaccaaagtggcggcgggcgaagccggcggcattacccaacacatcggtgcctaccacgtagaaaccgagaacggcatgatcaccttcctggacaccccgggccacgccgcgtttacctcgatgcgtgctcgcggtgctcaggcgactgacatcgtggttctggtggtggcggccgacgacggcgtgatgccacaaaccatcgaagctatccagcacgcgaaagcggcgcaggtgccgttggtggttgcggtgaacaaaatcgacaagccggaagccgatccggaccgcgttaagcaggaactgtcccagtacggcgtgatgccggaagagtggggcggcgaagcgcagttcgtccacgtgtccgcgaaagccggtaccggtatcgacgagctgctgcaggctatcctgctgcaggccgaagttctggagctgaaagcggttcgcagtggcatggcgagcggcgtagtgatcgagtccttcctggataaaggccgtggcccggtggctaccgtgctggttcaggaaggtacgctgaacaagggcgacatcgtcctgtgtggcttcgaatacggccgtgtgcgtgcgatgcgcgacgaattgggccgtgaagtgacctccgccggtccgtccatccctgtggaaatcctgggtctgtccagcgtgcctgcagcgggtgacgaagcgaccgtggtgcgtgacgagaagaaagcgcgtgaagtggcgctgtaccgtcagggcaagttccgcgaagtcaaactggcgcgtcagcagaagtccaagctggaaaacatgttcgccaacatgaccgacggcgaagtgtccgagctgaacatcgtactgaaatccgacgtacagggttcttgcgaagcgatcagcgactcgctgctgaaactctccaccgacgaagtgaaggtgaagattgtcggctccggcgtaggtggtatcaccgaaaccgacgcgacgctggcggcggcttccaacgccatcatcctgggcttcaacgtgcgtgccgacgcttctgcgcgccgcgtgatcgaagcggaaagcctggatctgcgttactactccgtgatctataacctgatcgacgaagtgaagcaggcgatgagcggcatgctggcgccggaatacaagcagcagatcatcggcctggccgaagtgcgcgacgtgttcaaatcgcctaagttcggcgctatcgccggctgtatggtgaccgaagggaccatcaagcgtcacaacccaatccgcgtactgcgcgacaacgtggttatctatgaaggcgagctggaatccctgcgtcgcttcaaagatgacgttaacgaagtccgtaacggcatggaatgtggtatcggcgttaagaactataacgacgtgcgcgtcggcgacatgatcgaagtgttcgaaatcattgagatccaacgcaccatcgcttaacgattgcacatctgcttatatctgtttacggggggcctttgtgccccccgatttgtctggagaatccaaaatggcaaaagaattcagccgcggtcaacgcgtggcgcaagagatgcagaaagagattgcgatcattctgcagcgtgaagtgaaagatccgcgcgtcggcatggcgaccgtttccggcgtggaagtgtcccgcgacctggcgtacgccaaggtttacgtcaccttcctgaacgtgctgaccgagaaccacgatccggatctggtcaccaacggcatcaaagcgttgcaggacgcttccggttacatccgcactctgctgggcaaagcgatgcgcctgcgcgtggtgccggagctgaccttcgcctacgacaactccctggtggaaggcatgcgcatgtccaacctggtgaccaacgtggtgaagaacgacgccgagcgccgttccgcctcaggcgatgacaaggaggactgatgagtcgccctcgtcgccgcggccgtgatatccacggcgtgctgttgctggacaagccgcagggtttgtcgtccaacgatgcgctgcaaaaagtaaagcgcctgtacaacgccaaccgagcgggtcacaccggcgcgcttgatccgttggcgaccggcatgctgcctatctgcctgggcgaagcgaccaagttttcgcaatatctgctcgattccgacaagcgttatcgggtgatcgccaagctggggcagcgtaccgatacctcggacgccgacggtcagatcgtgcaggagcgcccggtgaactttacccaggcgcagctcgacgcggcgctggacaccttccgcggtgacatccagcaggtgccgtcgatgtattcggcgctgaaataccagggcaagaaactctacgagtatgcgcgccaggggattgaagtgccgcgcgaagcgcgcagcatcacggtgtacgagctgcagtttatccgctgggaaggggatgagctggagctggagatccactgctcgaaaggcacctacatccgcaccatcaccgacgatctcggcgagctgctgggctgcggcgcgcacgtgatctatctgcgtcgcctgcaggtggcgacttacccgatcgcgcgcatggtgacgctggaacagctgaacgccttggtggcgcaggcgcaggaacaagcgatcgcccccggcgagctgctcgatccgctgctgatgccgatggacagcccggttgagaactatccggaagtgaatttgctgccggtggtggcgggctacgtcaagcaggggcagccggtgcaggtggccggcgcgccggcttccggcatggtgcgtatcaccgagggtgaagagcggaaattcatcggcgttggcgacatcgccgaggatggtcgcgtggcgccgcgccgcctggtggtcgaacatttcgactgacggcggggcactgcgtcgccttgcgatcgcactgcgctaagagtagaatggcgcagcttatgcattgggttgctgaattagagatcggcgcctgtttttattatctataatctggagtattacaatgtctctaagtgttgaagctaaagctcaaatcgtagctgatttcggtcgtggtactaacgacagcggttctaccgaagttcaggttgccctgctgactgcgcagatcaaccatctgcaaggccacttctccgagcacaaaaaagatcaccacagccgtcgtggtctgctgcgtatggtttctcagcgtcgtaagctgctggactacctgaagcgtaaagatgtagcacgttacaccagcctgatcgagcgtctgggtctgcgtcgctaatctagcaagtttcagtggaaaggggcctattttggcccctttcttctaggaagcataagcaaatcaggttaatgtattactgatgtttccaaacaggttcttccgttacagaggttcgcgcggctaatgagaggctttatctcccgcctgagataaggattgtcattagtcgcgaggatgtagtgagaaggcaaatcgagtcacaggcgtgtcgagtcgtcaatgcgattgcgcgccgctaatcaaggatataattttgctgacaccgatcattcgcaaattccagtatggccagcataccgtcaccatcgaaaccggtatgatggctcgtcaggccaccgccgccgttatggtgagcatggatgacaccgctgtattcgttaccgtcgttggccagaaaaaagccaagccgggccagagcttcttcccgctgaccgttaactaccaagagcgtacctacgccgccggccgtatcccgggcagcttcttccgtcgcgaaggccgtccaagcgaaggcgagaccctgacttcccgtctgatcgaccgtccgatccgtccactgttcccggacagcttcctgaacgaagttcaggtgatcgcgaccgtggtttccgttaacccgcaggtgaacccggacatcgttgcgatgatcggtgcttccgcggccctgagcctgtccggtattccgttcaacggcccaatcggcgccgcgcgcgtgggttacatcaacgaccagtacgtgctgaacccgacgaccgacgagctgaaagaaagccgtctggatctggtggttgccggtactgccggtgcggtgctgatggttgaatccgaagcggacgtgctgagcgaagatcagatgctgggcgccgtggtgttcggccacgaccagcagcaagtggttatcgaaaatatcaacgcgctggttgccgaagccggcaaaccgaagtgggattggcaggcgcctgcggtcaacgaagcgctgcacgcgcgcgtggctgaactggccgaagctcgcctgggcgacgcttaccacatcaccgaaaaacaagagcgttacgctcaggttgacgcgatcaaagacagcgtggttgaaaccctgctggcgcaggacgaaacgctggacgccggtgagatccaggacatcctgggcaacctggagaaaaacgtggtgcgcagccgcgtactgcgtggcgagccgcgtatcgacggccgtgaaaaagacatgatccgtggcctggacgtgcgcaccggcgtactgccgcgcacccacggttccgcgctgttcacccgtggcgaaactcaggcgctggttaccgcgaccctgggcaccgcgcgcgacgcccagaaccttgacgagctgatgggcgagaagaccgacagcttcctgttccactacaacttccctccgtactccgtaggcgaaaccggcatggtcggttctcctaagcgtcgtgaaatcggtcacggtcgcctggcgaaacgcggcgtattggctatgatgcctaaaccggaagatttcccgtacacggttcgcgtggtgtctgaaatcaccgaatccaacggttcttcttccatggcttccgtgtgcggcgcgtctctggcgctgatggacgccggtgtgccaatcaaggctgccgttgcgggtatcgcgatgggcctggtgaaagaagccgacaactacgtggttctgtccgacattctgggtgacgaagatcacctgggcgacatggacttcaaagtggccggtagccgcgacggtatcaccgcgctgcagatggacatcaaaatcgaaggcatcacccgcgaaatcatgcaggtggctctgaaccaggccaagggcgcgcgtctgcacatcctgggcgtaatggaacaggctatcagcactccgcgcggcgatatctccgaattcgcaccgcgtattcatactatccgcatcaacccggataaaatcaaagacgtgatcggtaagggcggttccgttatccgcgcgctgaccgaagagactggcactaccatcgaaatcgaagatgatggtacagttaaaatcgctgcgaccgacggtgagaaagcgaaattcgctatccgtcgcatcgaagagatcacggcagagatcgaagtgggccgtatctaccagggtaaagtgacccgtatcgttgatttcggcgcattcgtcgctatcggcggtggtaaagaaggtctggtgcacatttctcagatcgccgacaagcgcgttgagaaagtgaccgactatctgcagatgggtcaggaagtgccggttaaggtactggaagttgaccgtcagggccgcgtgcgtctgagcatcaaagaagcgatggcgccggaagcaggttcacctgcgcctgaagcagaataactgtatagatagttttacagctccccgccacggggttgggggctgttcgtatcgcgcgggtaggatgcccgcgttttagcaaacggaggacaggacgttcatccaatgtttgtcttcgggagtgggaaatgaagcctttcttgcgctggtgttacgttgcgacagcactcatgctggcaggatgcagcaaccatgattggcgtaaagacgaagttttggcaatcccgttgcagccaacgttgcagcaggaagtgatcctggcgcgcatggaacaaattcttgccagccgggcactgacggatgacgaacgcgcacagcttttatatgagcgcggtgtgctgtatgatagcctcgggttacgtgcattagcgcgcaatgatttctcgcaggcgctggcgatacgtcccgacatgccggaagttttcaactacctgggcatttacttaacgcaggcaggcaattttgatgctgcctatgaagcgtttgattctgtactagagcttgatccaacttacaattacgcgcgtttaaaccggggcatcgcactgtattatggcggccgcttcccgttggcgcaggatgatctgcaggcgttttatcaagacgacccaaacgatcccttccgttcgttatggctgtatctggtggagcgagaaatcgatcccaagaaggccgaggtagcgcttcagcagcgctatgacaaagcggacagagggcaatggggatggaatattgtcgaattctacctgggcaagatcagcgaaaaaacgctgatggaacgcctcaaggcagatgcaacggataacacttcgctcgctgagcatctcagtgaaactgacttctatttgggtaaacactacctgagtctgggggacaaggacaccgcttcggcgctgttcaaactgacggtgtctaacaacgttcacaacttcgttgagcaccgctatgcattgttggaattggcgcttttgggccaagagcaagacgacctatcggaatcggaccagcaatagctgacgaacacctatcagcctgatggacattggtttttaaccaaagttatcgccttcacgggcgagggcttttttgttcgttttataatctaatttgagccggttcacacttttcaatgaaaatgactgaaaattttctcgacgagttatgtagactggctgccattattaatgaggcacgtgtacatgacgactgagtttgaaacctcttttgccgatctggggctgtctgctccaatcatttccgccctgaacgatctgggctatgaaaaaccatctccgatccaggctgagtgtattcctcacctgttgaacggccgcgacgtgctgggcatggcgcagaccggtagtggtaaaactgcagcgttctcgctgccgctgctgcacaacctgcaggcagacctgaaagcacctcagatcctggtgctggcgccgacccgcgaactggcggttcaggttgctgaagcgatgaccgatttctccaaacacatgaacggcgtcaacgtggtagccctgtacggcggccagcgttacgacgtgcagctgcgcgctctgcgccagggcccgcaaatcgttgtgggtaccccaggccgcctgctggatcacctgaagcgcggcaccctgaacctctccaacctgagcggcctggtgctggatgaagccgacgaaatgctgcgcatgggctttatcgaagacgtagaaaccatcatggctgagatcccggctgaacatcagaccgcgctgttctccgccaccatgccggaagcgatccgtcgcatcacccgccgcttcatgaaagagccgcaggaagtgcgcatccaatccagcgtcaccacccgtccggacatcagccagagctactggtcggtctacggcatgcgtaaaaacgaagcgctggtgcgtttcctggaagccgaagactttgacgcggcgatcatcttcgtccgtaccaagaacgcgaccctggaagtggccgaagcgctggagcgcagcggttacagcagcgccgcgctgaacggcgacatgaaccaggcgctgcgtgagcagactctggagcgtctgaaagacggtcgtctggatatcctgatcgcgaccgacgttgcggcccgtggcctggacgttgagcgcatcagcctggttgtcaactacgacatcccgatggactccgagtcttacgttcaccgtatcggccgtaccggtcgtgcgggccgcgctggccgcgcgctgctgttcgtggaaaaccgcgaacgccgcctgctgcgcaacatcgaacgcaccatgaagctgaccatcccggaagtggaactgccgaacgcagaactgctgggcgagcgtcgtctggccaagttcgccgcgaaagttcagcagcagctggaaagcagcgatctggacctgtatcgcgcactgctgaccaaactgcaaccggaagaagagctggatatggaaactctggccgcagcgctgctgaaaatggcacagggcgaacgtccgctgatcctgccgccggatccggtcttcaagccgcgtcagcgccgcgagttcaacgaccgtgacgatcgtcgcggtgatcgtggcgaccgtcgtgacagccgtgacggcgatcgtccgcgtcgcgaacgtcgtgacgttggcgaaatgcagttgtaccgcatcgaagtgggccgtgacgatggcgttgaagtgcgtcacatcgttggcgctatcgctaacgaaggcgacatcagcagccgttacatcggtaacatcaagctgttcgcttcccactccaccatcgagctgccaaaaggcatgccgggcgagatcctgaatcacttcactcgcactcgcatcctgaacaagccgatgaacatgcagctgctgggcgatgcacagccgttcgaacgtcgcgagcgtcgtgacggtggcaacggcggcgagcgtcgcggcaacggtcgtccgttcaacggcgaacgtcgcgaaggcggcccacgtcgctccttcggcgaacgtcgtgaaggcggcaacggcggcgagcgtcgtggcggtaactacaaccgtgacggcaagccggcgccacgccgtgatgacggcgcaccggcggcaccacgtcgtcgtttcggcgacgcgtaatcgctgattcgccgttcgcggtgaagcgctctgaaaaaccagcctgcgggctggtttttttatgcctgaaaattgccgtcaaacgcccctgaatggcgtatcattcataaggttttttcttacggatgatatgcacgggagatgccatgagttggcagcagttcaaatctcaatacctggtgcgcttttgggcgccgctgccggcggtgatcgccgccgggatcctctctacctactacttcggcatgaccggcaccttctgggcggtgaccggcgaattcacccgctggggcggccatgtgctgcagtggttcggcctgcaccccgagcaatggggctatttcaaggtcatcggcctgcagggcacgccgctggagcgcatcgacgggcgcatgatcatcggcatgttcgccggctgcatcgccgccgcgttgtgggccaacaacatcaagctgcgtcaaccgcagcaccgcattcgcatcgtgcaggcgctgctgggcggcatcatcgccggcttcggcgcgcggctggcgatggggtgcaacctggcggcgttcttcaccggcattccgcagttctcgttgcacgcctggttcttcgcgctggcgaccgcagccggctcttacttcggcgccaaattcacgctgctgccgatgttccgcattccggtcaaattgcaaaaggtgaaggccgccgcgccgctgacgcagaagcctgagcaggcgcgccgtcgcttccggttgggcatagcgatcttcggtctggcggtggcctggtcgctgtggacgctgttcgatgcgccgaagctcggcatcgccatgctgttcggcatcggctttggcctgctgatcgagcgcgcgcagatctgcttcacttcggcgttccgcgatctgtggatcaccggtcgcacccacatggcgaaagccatcatcatcggcatggcggtgagcgccatcggcatcttcagctatgtgcagctcggcgtggcgccgaagatcatgtgggccggcccgaatgcggtgctgggcggtttgctgttcggcttcggcatcgtgctggccggcggctgcgagaccggttggatgtaccgcgctgtggaagggcaggtacattactggtgggtagggctgggcaacatcatcggcgctacgctgctggcctattactgggacgacctggcgccggcgctggcgaccgactacgacaagatcaacctgctcgataccttcggcccgatcggcggcctgctggtgacttacctgctgctggcgctggccttcgccgccatgctgtggtgggagaaacgctttttccgcgcccggcctgaggcgcaggtggtgaatttgaggagcatgccatgaaagagacgacgatagtgccggactaccggctggacatgctgggggagccttgcccgtacccggcggtggcgacgctggaggcgatgccgcagctgaagccgggggagatcctggaggtgatcagtgattgcccgcagtcgatcaacaacatcccgctcgatgcgcgcaaccacggctacaaggtgctggatatccagcaggacgggccgaccatccgctatctgatccagcgttaacgccgaggcggtggggttcccaccgccttttcgctttttagcccttcacgatgtcgcctttcacgccggcgacgatctcgaacgaacgcagccgcgcctgatgatcgaagatctggccgttgaccatgatctcgtcggcatcggtttcacgcagcagcgtttgcagcccgtgacgcaccgttttttcatcgccgacgatcgacatccgcagcgcctgttcgacgccgtactgctcgccggcgctccacagcgcgtggatgttatccaccggcggcggcagcgggccgggcgaaccgcggcgcagattgatgaactgctgctgcatcgagctgaacaggaagcgcgcgtcgcggtcgctgtcggcggcgatcacgttgacgcacaccatggcatgcggctgcgccagctgtttggagggtttgaagttctcgcggtacagttgcagcgcctggaacagcatatccggagcgaagtgcgaagcgaaggcgaacggcaggccgagctgcgccgccagctgtgcgctgtagaggctggagccgagcagccagagcggcacatgcagcccctggcccggcaccgcctgcaccggctggccgggctgcgcgtcgcagaagtagttttgcagttcctgcacgtcgcgcgggaaggtatccacatcgccggacaggtggcggcgcagcgccatcatggtgcgttgatcggtgccgggcgcgcggcccagccccagatcgatgcggccggggtagagcgattccagcgtgccgaactgctcagcgatcaccagcggcgcatggttcggcagcattacgccgccggagccgaggcgaatgctctgggtgccggcggccagatagcccagcagcaccgaggtggcggcgctgccgatgccggtcatattgtggtgctcggccagccagtagcgctggtagccccagcgttcggcgtgttgcgccagatccagcgaacagtggaaagcgtcgcgcgccttggccccttgcgggattggcgataaatccagtaccgaaagcggtacggcagtgtgttcagtcatgacatcgtccatcagagagtggatcgcttaaagggcgattgcaggaatctgcatactaaaaggccgaaaaaagatgctttttagtgttaaaagcataatccaatttatagttataaaagaggagatatgtgcttgtgatatcctcatgagtgcaatggtgttttttggagcaatttgagacatggaaatgatgatccccgcccgccgcttaccgttccgggagccgatataatgaaaaaaaagacgctgtttaccctgttgctgatgatggtggcgatcgcattggcgatcctgttccgcgcgcacaatcaggatctgttgctgcagggtgaagtggatgcccccgaagtgatcgtcgcatccaaggcgaaaggccgggttgttgaacgcctgatcgaacgcggcgatgacgtgaaaagcggccagctgatcatccaactcgacagccccgaattgatggcgcagctgcgttccgcgcaggcgacgcgcgacgaggccaaagcgcagctcgagctgtcgctgcacggcacccgagaagagagcatccgcaacctgcgcgccaacctggcgcaggccgaggcgcagtaccgcaatgcgcaaaacgactacaaccgtaacctgagcgtggccggcaagggctatatctcgaagtccgagctggacgcttcgcgccggtcgcgcgacaccgccttccagcaggtgcaggccgccaaggccaacctggatgaaggcatcaacggcgaccgcgtcgagcagcggcagcaatatgcggcggcgctgcgggcggcggaagagaacctgctgcagatccaggcgcagagcgacgatctgcaggtgaaagcgccggtggacggcgaagtggggccgatcccggccgaagtgggcgaattgctgaacgccggcagcccgctggtgacgttgatccgggtgccggacgcttacttcgtgtttaacctgcgtgaagacatcctggcccacgtgcgcaaaggcgacaaggtcaagctgcgggtgccggcgctgaaggacaaaatgatcgacaccgaggtgcgttacatcgcgccgctgggggattacgccaccaaacgcgccacccgcgccaccggcgacttcgacctgaaaaccttcgaagtgcgcctgtatccgtcacagccggtggacggcctgcgtccggggatgagcaccttatggcaatggaaagagtaagggccggctggcgctgcttcagtcacgcgttcgacaaagagtgtcgcgtcgcctttcgcagcccggtggtgcactggctgagctggatctttccgctgatcctgtttgcgctgatcagcagcaacttctccgaaggcacgctgctcgatctgccggtctcggtggtggacagcgatcacagcccgctgtccaaatcgctgacgcgccggctggacgccgggtcgcacgcccacgtcgaggcatacggcggcgggctgccggagtcgctgagccgcctgcgcagcgcgcaggattacgcgttgctgtatatcccaccggactttgaggccaatgcgctgtcgggcaaacagccgagcgtggtgatgtactacaacgcgctgttttacggcgccgggctgtactccacccaggacttcggcggcctgatgaacgaaatcaacgccagcacccgcagcatcatcgccaccgagatgggcaaaacgttgccgccgctggcggacgtgacgctctcctacggcagcctgttcaacgccagcggcagctatatctattaccagcagttcgccgccaccatccacctgctgcagctgttcgcggtgacctgcatgatatatgtgctggcgcgcagcaagtcgctgctgcaggccaagccgttcagcctggcgctgctcggcaagctggcgccgtacacgctgtgtttcaccaccctgctgatggtggagatcgcggcgctggtgggcatctttgacgcccgcgtcagcggcaacccgctgtttatgctgatgatcggcctgttttatgtgatggcggcgcagagcatcggcctgctgctgtacacctttaccggcagcaccatcaccgcctacagcctgatcggtattttggtcagtatcgcgatgaccttctccggcatggcggtgcctgagctgtcgatgccgctgccggcgcgcattatttccaacatcgaaccgctgacccacgcgctgtacgcgatgtttgacgtgttcctgcggcaggtgcacgccagcgccatcttcagcgtgtgcgcgctgctggcggtctatccgctggtggccgcgctgctggtgcgcaatcgcctgccggcgcggctggcaaaagaggggagcgccggatgaagctttattggcaaaccttcgttaaagtgctgctcggcatgctggagcggccggtgtggctgatgctgatcctgtcgctgtgcatcatgagcctggtgtacgccaaccgcacggtgtgggatctgccggtgggtgtgatcgatcaggatcacagcaccgccagccggcagctgatccgccaactggacgcaacctccaagatcgcgattgaaacctacgacagcctggaacaggcgcagcgcgatctcagctggcgcaagctgtttgcggtgatcatcatgccggtggatctggagaagaaaattctcagcgggcagaacatcgtggtgccgatgtacggcgacgccaccaaccgcctggccaacggccagatccagcaggacgtggtggcggcctatcagcagctgctgacgcaatacaacaacgggctgctgctgcgcagcggcttcagcgaacggcaggcgcagatactgctgacgccgatactggggcaaacgctggacgtgttcaaccccggcatcagctttgcggcgatcatcttccccggcctgctggtgatgctgttacagcactcgctgctgatcgcctgtatccgcgtcaatatcgccatgaagagcatgcccggcggcaaggcgccgctggcggcgcacctcggcgggctgacggcgctgctgccgatctggctgttcctgtcgatcgtgctgttcgtgctgtggccgtgggtattgggctataggcagacggcgaacatcgccgaactgctgctgctgaccttcccgttcctgctggcggtattggggctgggcaagctggtgacagaatgtctgcgcagcgtcgagatgatctacctgacgctggcgttcatcaccacgccgatcttctacctgtccggcactatctggccgctgcagtcgatgccggcctgggtgcgcgccatctcgtacagcatcccctccacctggggcaccaaggcgatcgccggcgtcaaccagatggggctgtcgctgaatgaggtgtggggcgacgtggtgatgatgctgatactcggcgtggtctacaccctactgggctttggcgtcggcttcttgcgcaacagcgtggcgctgcgcgggatgttcaggaagcggcgggcgtaggggataaataaaggcgccattttcggcgcctttattatttcgtattattgatatgtctaaggtgatttatttagctgggcgtctactcttatttttaatttgatttgttatgttgattttggtagttgtaattgtcgacctgcttagggaattaatggttggcgttaactttatctataacgtgttatttaaaggatggaataatatgtcaacaataagagcgcttgattttgatgagataaaattgattggcggttgtggcgatggaaataacggcggcgatcgtgacaggccaggcagaggtgcgtcaaactcttgtgccaatcaggttggaatgggcattatcattggcgcatttaccggtttttccggcggccctccagggatgataggtatggcggttgccggtggcttaatgggggcggtctcttgcgcagataacagccctgccgggaataataagaataacggtggtgccttgggtgggaataaaaacgccaatagcgttaatgggcaatgtcgctggtgatgagtaaatcgcttttagagtgttaaaaatagagggtgggttatggttaatagacgtcttttaaacccgctatgtaatatgattgcgctaacgttgagtatgttacttgtctcgttctcctcactgagtattatttcatacggagaacatttggtagatgcggccatcgcggttttcacttattttggtatcagaagctgctgcctgatgtgtgtaagtttattccattggttccacggtggagatgagcgcattaatcttgataaataaacagagccggcagcgcccgctgccggctctgtcctcgttaagacaccaactccagccccgccacccggcgccagtagccgttgcagtcggcgtggtcggtcaaggccagcggctgctcaccgcgctcgttggcgcggaaggcgtcgatttgcgccagcgtctcggcgccctgcggcgacagccgcacgatgtccaccagcccctgcatgcttggcagctcgttgccgaggttgtagcagtaaccgctcatggtctggatgccgttgagcacgaacacctgctgttgctcctgggagcgcatcatgcggccctgcggatatttgatgcagcaggtttcgcactcgtccttgccgcggttctccgagcgggcggtgaagcagcgcgccgagtaggccaacggcaggtggccgtagctcagcacctccacctcgaaatcgtggcggaagcccagctcgtcgcactgcgtcagcaggttggccagccagtcgcgcgacagctcgaccggcatgcaccagcgcaccatgccctggcggcgcagcaggcgcagggtataggcgttgtagcagttcagcgcatggccggcgacgaacggcaagccgcgttccgccgccatgttcaccgcgcccagatcgttggcttccagcaggaactcgccgttctccacatagcgtttcagctcattcagctcggacggcgcctgcagcagcgccagcgtggagataaccacctgtttgccgctgcgggcgatctcgcgcgccagcgccagccaatcgctgaccttcatctcgcgccgtttggtgcagacgctctcgccaaggtaaatgatgtcggcgctgctctccgccgcctgttgatagaacgccgcgatgtcggttttcggccagtagtagagtaccggccccagtgcgtatttcatgtttcctccggctactgccatttgcggtgataggcgcccagcgtggtctgggtgccttcggacatcgcgcccagcgtctccatccaggcggcgtcggcgcgataggcggccggatcggcctggcaacggtcgatcgcctggcgccagacgcgcgctacctggctgacgtaagccgggctgcgctggcggccttcgatcttcaccgaggcgatgttggcggccagcagctccggcagcagctccagcgtattgaggctggtgggctcttccagcgcgtggtagcgcacgtcgtccaccagatagcggcccttgcacagcgtcgggtaaccggcgttttcatggtcctgatagcggtcgatcagcacgtcgttcaggcgcgactccataccctgcggggtttgctgccagcgcacgaagcgcgccggcgagcaggcgccgacggtgttcggcgactcgccggtcaggtaggaggagaggtagcagcgcccctcggccatgatgcacaggctgccgaaggcgaacacttccagcggcaccgggctggtgcgcgccagctgtttcacctgatgcatcgacagcacgcgcggcagcaccacccggcccacctcgaagttgcgctggtagaaacggatcgcctcttcgttggtggcggaggcctgcaccgaaacgtggcgctccagctgcgggtagcgctgggcggcgtattccagcatcgccagatccgccagaatcagcgcatcggcgcccagctgggcggccatatccaccgcgcgctgccagcgggcgtagccgtcgggatgggcgaaggtgttgatggcgatatgcaatttgcggccgtggcgatgcacgtaatcaaccgcttcctgcagctttttctcggtgaagttgaggccggcgaagtggcgcgcgttggtatcgtctttcagcccgatgtaaacggcgtcggcgccgttatctaccgcggccttcagggccggcaggttgccggcggggcaaagcagctccatagatttatcctggcttagccgtgcgcccggccgggcgcacgctgtctttaaaggttgccggcggcggtgttctgccggcaaacgcgaatcggggaggccattttaggcgaaggggtgcgcacaggttttgatttggggcagcttatggcgtattgataaacatggcggtgaaatgcactatttgttgatatagaccgctgaagccgcgcgccagtgtggcaaaatagcggtagtccgtattgaaaggagtggatgaccgtgttggaacaactacgagcacgccttgtgcgccaggggccgtcgctgctgcgcatcccgctgaaattcacgccgttcgccctgcagcgccagctgctgcaacaggtgctgagctggcagttccgccaggcgttggtggatggcgaactggaatttctcgaatcgcgctggttaaagatcgaagttcgcgatctggcgctacactggtttatgacggtagaaaacgacaaactggtggtcagccagcacgccgaagcggacgtcagcttcagcggcgacgccaacgatctgatcctgatcgcggcgcgcaagcaagatccggatacgctgttctttcagcgtcggctgcagattgaaggggataccgaattgggcctgtatgtgaaaaatttgatggacgccatcgagctggaaagcatgcctgcgccgctgcgcatggggctgttgcagttggctgattttgtcgaagcagggctgcaggagggcacggcgtcggcttcccgtgtggcggcatcatgctgatccgcgtagagatcccggtagacgcggcgggcatcgacgccttgctgcgccgcgcctttggccgcgacgacgaagccgatctggtgcagcagctgcgcgaagacggcctgctgacgctgggcgtggtcgccactgacgacgaaggcggggtggtggggtacgccgcgttcagcccggtggatgtggccggcgaagatcgccaatgggtggcgctggcgccgctggcggtagacgaaagcctgcgccgtcaggggctggctgaaaagctggtgtacgaaggcttggattcgctgaacgaattcagctacgccgcggtggtggtgctgggcgatccggcctactacggccgcttcggctttaaaccggccgccgcctatggcttgaactgccgctggccgggcacggaaagcgcgttccaggtgtatccgctggcggaagacgccctgaatggcgtcagcggcgaagtggctttttcggcgccgtttaatcgcttttaaccaccggcaacaaatactccaacgacagcggcgggtgattcaccagccgctctttttgtattttgctcagttgtttgacgcggtattccagcttcaacgccgttgagcgatcccccacctggcagtgaaacgccagcgtcagctcccctttgccgcgcagcgccttggcgcctttgccggcctgatgttgcgccagacggcgcgccacgtcggtggtgatgccggtatacagtatgccgctcggtaaacgcagcatatagagataccagtggggtaagtccatcattggggtcctgtgcaagggtagagatgacatcaggccgccatagctaagcgcggcatctctattttgtcacgatttaacgatggatttcaccactggcggaacggtttgtttattccgtcttgacgataagggattattttacacccacggtaaatttgttttcttcccctttatgatgctgaattgtccactcgccactgacgcggaatgaagccgcggaagcataggtgtcttccataaactggaaataaacgatttttccgtctttgacttgcgcttttattgcgaaaggagaggtgaactgatggcctaacgctactgaggtataggtgaattgaccaaatacggccacggtgcctccgtcggcaagaatgtcaccgatcgtgaagtcgtttatttcccagtaagttccgacatttgaaaaggtatcgatgtaaacctgtcgcccttgagaagtgcccgcccagggctcgatctgtttgagctctttgttttcaaagttcagggaagtataaaccgcgttttcatcgataagacgcatggcggcattggtgacgtcttcctttgccgtgttcatcaagaatgcataaaccacatcttttggcagttgagtctcttctgctttcacaatgagtttttcattgtttttcatataaacctcgtcacgtgacttccggggtgaataattggccgtttattccgatgatgagccggtgattggttgtaaatcaacgatgatcatagcaccgccggaaagcagagcagatgatagaaagtgcttaggcgttcaggaaataaagtccctgcaaaacggcattaatcatcataacgacatattaaataaggggttttattcatggtaaaggcgttggcgcacatggggtgacgaagcgagaacgctgttttaaatggatttatataagcggtatcaatgatgttttgatgctttttatttatgaatggcggtagtgaacaggaattatgcttggtggcttggatttactgataataaagcccgagagtaagaaagagagtgagtcattccagtcactagagcggcgtgggcgacagagagcgtcggctggccagggttgcgatgaggtgatattgcgccctatcacaatcccatccccggccgccggtgccttaccgctttaccccttttttcccgccagctcgaagcgcggcgagacgatgccgtacagcgtccagccgaggaaggtggcgatggcgccccacatcatcgcttcctcaccggagctgtagagcgcgtagaagctgtacagcgcgccgatgccggcgatgatattggcgatgcgcgccttgttgtccggcaccttcgccactttctgaataatcaccagcgccgccatcgacaggatgtaagggatgatgttggtcaccaccgccaggttcaccagcacgttgaactgtttgttcaacgacgggctgatggtcatcagcgacaaaccgctctggatgacgacgatggtcagcatgcctttaaccggcgcgtcggccttgctcagcctggagaagattttcgggaagaagccgctgtcggcggaggatttgaacacctgagcgatggtgaactgccagccgagcagcgagccgacgcaggacatcaccatcaacgccatgatgatcttgccgaccgtcgggttgaacatgtgggagaaggccagcccgaacggggcggtggagttggccagatccatgttcggcacgatgccggcgatcacgttggtcgaaacgatatagatcaccgccgcgctgagggtgccgcccagtacggcgatcggcacgttgcgctccgggttttccaccacgtcggtgttggcgcaggcggattccagccccaggaatgcccacagggtcatcgagatcgaggcgccgatggcttcgaaggtcggcacctgatgcgggttccaggcggcgacgtaggcgctgccgctgaaccagtaccagccgatgaccgagatgcccaccaccggaatgatcacgccccagacggtgatgccgctgattttgccggtgatgcgcgcaccgccgaagttggcgacggtcgcaagccacagcacgccgatggtggcgatacagatcccgagcgggctgagcgtggtgtcgaacagttcggtgccgtagcctacggcggaaatggcgatggcgatgttggcgatcagcagcgaaacgccataggtgtagttcgccatgaagttgcctgatttaccaaaggcgtattcggcgtagccgcccatgccgccggatttacggctgaacatgccgcatttggcgaacgcgtaggccaacgccatcgagccgacggcggtcaccagccaggaaacgatcgaaatcgtgcccacttcggccaacttggtcggcagcataattatgccggaacccatcatattcacggcggtcaggatcgttaattgcacgacccccattttattattggacttactcatgatcattttctcttttaggatgcgatccgggcggcgagaataatcgccgccccgtaaggtgattaatttttcatgacgtagccgtaagcgcggttccagccgtcctcatcctgttggatataaacgccctgcaattccggcgcgaatcccggcaataaattgatgccttcttccagtgccaggaaataacgctgcgcggcgccaccccaaatttcgccgggcaccacgcacagcacgcctggtgggtaaggcagggcgccttcggcggcgatgcggccctcggccttggccagcgacaccaattccacattgccgcgcacgaactcggtattggcgtcctgcgggttcatcaccacgcgtgggaaatagcttttgcggaacatctctttttgcagttctttaacgtcatagctgacgtaaaggtcgtgcatttcctggcacagctggcggatggtgtagtttttgtagcgctgctggtggtttttatagaccgcaggcagcacctcgctgagcaatgagttttgctcgatatgcttctcgaagcgggcgatcagggccaccagatgctgcatcttggcgatgtcttccgccggcgtcagcaggaacaggatcgagttgagatcgcatttttccggcacgatgccgttttcacgcaggtagttggccagaatggtcgccgggatgccgaactcgctgtagctgccggtcgcggtatcgatgcccggcgtggtgagcagcagtttgcacggatcgacgaagtactgcgattcggcatagccctcaaaagcgtgccatttttcgccgggcacgaagttgaagaagcgcagatcgttggccatcgccgcggtgtcataggcctgccaaggcttgccgtcgatctgatccggcacgaacggtttgatcatcgtgcaggtatccagcagcattttgcgcgcttcgatgcccacgcgcacacattcttgccacaggcgctggccgctcttgccctcgtgcatcttggcgttgacgtccagcgcggcgaacagcgggtagaacgggctggtggaggcgtgcagcataaaggcgttgttgaagcgcttgtggttgcagtagcggctctgccccttgatatgcttgtcttttttgtggatctgcgaggtctgcgagaaaccggcctgctgtttgtgcaccgactgggtgacgatgatgccgggatcgttttcgttcagctccagcagcagcggcgagcagtctttcatcatcggaatgaactgctcatagcccacccaggcggagtcgaacaggatgtagtcgcacaggtggccaattttgtcgaccacctggcgggcgttgtagatggtgccgtcgtaggtgccgagctggatgatcgccaggcggaacgggcgggcttcgttggcgcgttccggcgccacttcgcggatctgttggcgcaggtagcgttcgtcgaagcagtgcgcgtcgatgccgccgataaagccgaacgggttgcgggcggtttccaggtaaaccggcgtggcgccggcctggatcaacgcgccgtggtggttggatttatggttgttgcggtcgaacagcaccagatcgccgcgcgtcagcagggcattggtcgccaccttgttcgaggccgaggtgccgttgagcacgaagtaggtcttgtcggcgttgaacaccttggcggcgtgctgctgtgcagcgcaaggcgcgccttcgtggatcaacagatcgcccagtttgacgtcggcgttgcacatgtcggagcggaaaagcgtttcgccgtagaagtcgaagaactggcggcccgccggatgtttgcggaagaactcgccgccctggtggccggggcaggcgaaagtggcgttgcccatttctacgtattgcgtcagcgtgttgaagaacggcggcagcagttcgctctcatatttggcggcggcggcctccagctgtttgccgtagaactgggtattcttgccgcacagttcaaacacaccgtgcagcgccggcaagacggcgttatccagctcttcttcgcagcagacggcgacgaacagcggaatgttcaggccgtgttcttcgatgcgcgccaccatgccttgcgcgacgtcgtctaccgacagcacgatggcggcgacgtcattgaaatcgctgtgatgcacatcgacgatgtcgcgttcagtttcaaagcagccgagggtttgggtgttggcggcaatttttaattttttcatttttctcattcttcaggcaaaggcattccgccggcaaataatttcatttgccgctaacgccttcacgaaaataaaggtgtgcgagaacccagtgatgccgaaaggcattaactgtgttcgctgttttatttatattggatgcgcttggccgaaattaaaaatgtattgcgcgcccttcccgcttagcgagaaaaagacattatcaccggagtgcggagaataaagtgaaacgcaaagacactcttaacaacggcgtaagagcgaaggggagggttatctgtagttgaagaatgcgaagctaaagcagctgcgatgagccatcatcataatatgggttgtacgcctgatgtgcgccatttttcggttattgttttccattttctaatccaccttgctgagtgaaaagatggcgctattttagcgcaagatgcactaaaaattgtgatgagaatcacataaatgccggttttgataaataactattcaccggttatgcaatgtgttgcataagtatcatccagacgcagaggttggcatgtaaatgaattgctaatgttcgcgggccttgagcgcttaattttgatgccgcccgagaaggaataaaaaaagcggtcaaataaccggctgcataacgatcaaataaatccgcattgtgttatttatgttatcaatctgctttatgctggattgggtaaaaattcaaatataatggttttgtattcacatgcgatttttgatgattatcgttatttgtgactcgcctcaacaacgcagggtaagatgaagtgagtgaacagggaggcgagtaaccttgaataccccagaacaacggcagcagattgcggattttatcggtaaacaacacgtcttgacgctgtgcgccggcgacggcctcgacatgtggtgtgccaactgtttttacgtgttcgacgccgcgacgatggcgctgtggctgatgaccgaaccgcacacccgccacggcgggctgatgctgaacaacggccgggtggtcggcaccatcgcgccgaagccgaaaagcatcgcgctgatccgcggcgtgcagtaccgcgccgaggcggtgctgctgagcggcgaagaggccgaggcggcgcgcgcacgttactgcaagcgtttcccgatcgccagggcgatgaaggcctcggtttggcggctggatctgcacgaggtgaagatgaccgacaacaccctcggcttcggcaagaagctgcactgggcgcggtctatactttaagtcgacgtattgattacaacgggagatcgcatggcgcgagcactgttagtcggcgcaaccgggctggtggggcgcgagttgctgcagcggttgcaaagcgatccgcagataacggccatcgtggcgccgacgcgcacgccgctgccgccgcacggcaagctgaccaacccggtcggcgatgcgctgttcgagctgctgagtagcctgcagcaaccggtcgatctggtgttctgctgcctgggcaccacccgccgggcggcgggcagcgccgatgccttccgctacgtcgattatcaactggtggtggagagcgcgctgaccggccgccgcttgggggcgcagcactgtctggtggtgagcgcgctgggcgccaacgcggattccaccttcctgtataaccgcaccaaaggcgagatggagcaggcgctgcgcgaacagcgctggccgcgcctgacgctggtgcggccttccatgctggtgggggatcgcccggcgccgcgcctgatggagcgcctcacgttgccgctgttcaggctgctgcccggcaaatggcgggcggtcgccgccaaagacgtggcgcagacgctgttgcagcaggcgttcacgccgggtgaaggggtcagggtgctggagtcggaccggctgcactgctaccgaggctgacgctgaggtggtcgaacgccagctccagcccggcgggcagttcgtggtccagcagccacagatcgagatgatggctgatgtgcgtcagcagcgtgcgtttgggctgcagcaaccgctgcgtctcctgcgcgcgggtcagatcgttgtggttgcgcggcgcctgcggctgaggcggcaggctgcagtcgagcaccagcagatccagcgccacgttctgcagatagccgacggtggccggcggcaggccgacggtgtcggtcaggtaggccagcgcagcgcccgccgcctggatcagatagccgtgggtcagtttggagtgttgcagcggcagtggggtgatgcgcatgccgcccagttcgacggtggcgaagggcgccagcggcggctgaaatgccaaaatgccggggtgtttgaacaggtcgtcgcagccctgttcatccggcgggccatataccggaatggaatttccgcacccccaacgcaaaggaaataacccctgaacgtgatccatgtggtaatgtgtcagtaaaaaacgttgaatttgccccgccgaaaaccgccgctccaaagccggtaatcccgcatccaataaggtcgtttccccctgatagttgagcatggcgctgcacgctcgccgccgaaatgccggctcgcgccgcgcccgttggcagatagggcagtcgcagccgaacaccggcacctgctgcgcgccgccggtgccgagaaaggtcagttgcatcgctcccctccgttaaaggtacttctgcgcaaagcggttaatgtcgcgaaaatccgccagccgcgcctgcagcgtggcgtgatcccagtgccaccactggctgcgttcgatgcgttctatcagcgcgtcgtcaaagcgcatgccgatcttcttggccgccacgccggcgacgatgctgtagggctccacgtctttggtgaccaccgccgcgctgccgatcaccgcgccgttgccgacgctgacgcccggcatcaggatggcgttatggccgatccacacgtcgtggccgacggtgacgtggtgctcgcgccgccagtcgaagaacgctgcgtcatcttcccccagcccgtattcggaagcgcggtaggtgaagtggtgctgcgcgatgcgctggtaggtcgggtggttgccgggattgatgcgcgcataggaggcgatggagacgaacttgccgatagtggcgtaaaagatctggttgtgcccggcggtgtaggagtagtcccccatctccacctcttccaggatcgcatcgtcggccaggtgcacatactggccgagccgggtgcggttaagggtcacgttgtcgccgattttcggctgggcgaagtcgttcatggcgtcgcgtcctgagtttgtcgggtagaggtcggcagcagcgccagcagcgccgccagggtgtcgtcgagtgggccgtcgttgtgcagcacccggcagccggcgggcaggctctgctgatattccgccgcccgcgccagccgctgctcgatctgttcggcgctttctcgcccgcgatcctgcaggcgccggcgcaggatcgcggtgctgacctgcaggcataccggcagcagctgcgcgccgtagcgctgctgcgcctgcggcaggtgggcgcgcgaaccgttgaccgccacgtcgatcccctgcagcagccaaagatccacctcgatcccgaacgcgtagcgctgctggtgcgcctgccagtcgagcgcgaacagccccttggcgcggcggcgcagaaattcgggttcgctcagcgcgatgtgattctcgcagccggcgtccgccggccgggtgatgtagcggtgcgccaccagcggcgcgcggtcggcgtcggcccgcagcgcggccagcaggctgtccttgcctgcgccggaaggccccatcagatagatgagccgcgccatcagaacacctgcctgccctgacgccacacgttctgcacgtaaacgtgctcgccgtgcggccgcgccagcaccagatccgcccgcaatccttcggcgagggtgccgcgatcctgcagatccagcgcccgcgccgggttgcgggtgatcatgcgcaccgcctggggcagatcgtaggcgttgcgctcgtccgccgcgaggcgaaacgccgcgtccagcaagctggccgggtaataatcggaagagagaatatccagcacccccagcgccgccaggtggtgcgccgccacgttgccggagtgggaaccgccgcgcacgatgttcggcgcgcccatcagcacctgcaggccctgctggtgcgaggcgcgggcagccgcctcggtggtggggaactcggcgatggcgctgcccagcgcgcaggattcggccacgtgcgcggcggtggcgtcgtcatggctggccagcgagatgcggcgcgcgcggcagtgggcggcgatcgcctcgcggttcggcgcggcccagcgggcggacagggcgacctgctgctcctcgtactcgctcatctgctggtcgttgaggtggtatttgccctgataatattcgcgatacttttcgcgtgaggcgaactggcgctggcccggcgaatggtccatcagcgacaccagcgacacgcccggcttgtccatcagctgttcgaacagcggcagggtgctctcgtgcggcagctcgcatcgcaggtgcagccgatgctcggcgcggttcaccccggcgcgctggctgtggatcaccgcgtcgatcatcttctgcaggttttccagccggtggccgccgtcgcgcacgtcgccgatcgccaccgcgtccagcaccgtggtgatgccgttggccaccatcagcgcatcgtggctgctcatcgccgaatgggccggccagtcgacgttcgggcgcggggtgaaaaacttgtccaggttgtcggtatgcagctcgatcagccccggcagcagccagccgccgtcgccgtccagcgcctgcggcagccggctcgggccgtcggcgaagctgcggatcacgccgtcctgcatctcaagcgagccttgcaccacctggtcatccagcaccagcttaacgttattgacgatcatcagagggcctccagcgcctgcggcgcctgcatatcataaagccggtcggcgacctgtcggcggacgccttcatcgtgaaaaatgccgacgatcgccgcgccgcgcgccttggcgcgttcgataagctgcaccaccgccgcgctgttgcggctgtcgagcgaggcggtcggttcatccagcaacaggatggggtagtcgacgataaagccgcgcgcgatgtttacccgctgctgctcgccgccggagaaggtggacggcgccagcggccacaggcgctgcggcacgttgagcgcagcgagcagcgcttcggcgcgttcacggcactcgacgcgctcgacgccctgttccagcaagggttgcatcaccacctccagcgcgctgatgcgcgggatcacccgcaggaactggctgacccagcccagcgcatggcggcgcacggccagaatctggcgcgcgtcggcgctgaccatgtccagccagtcgccctggtggttgatccagatatggccgctgtccggcaggtagttggcgtacagcgagcgcagcagggtggatttgccgctgccggagtggccgtgcagcaccacgcattcgccgccgtggaccgtcaggttggcgtcgtgcagcaccggcaggcgggtgccgtactgctgatgcagcacaaaggttttactgagatgttcaactcggatttgcatagtcatctgttatcgccttgggttacgacagcaccgaagaaaccagcagttgggtgtaggggtggtgaggatcgtccagcacccggtcggtcaggccgctctccaccacttcgccctgtttcatcaccagcaggcggtgggccagcagccgcgccacgccaagatcgtgggtgacgatcaccgccgctagctgcatctccaccaccagattgcgcagcagatcgagcaggcgcgcctgtaccgacacgtccagcccgccggtcggctcatccataaacaccagcctggggtgggtgaccagattgcgggcgatctgcagccgctgctgcatgccgccggagaaggtggtcggcagatcgtcgaggcgcgacagcgggatctcgacgtcttccagccactggccggcctggcggcgaatgtcgccatagtggcgctggccgatggccatcagccgctcgccgatgttgccgccggcggagacctgcggccgcagcccgtcgagcggatgctgatgcaccacgccccagtcggtgcgcagcaggcggcggcgatcgctctccgccatggcgtacaggtcgtgctcctggtccgcctgagggcggtaaaggatctgcccgcgctgcggcgccagccgcgccgagatcgacttcagcagcgtggttttgccggagccggattcgccgacgatgcccagcacttcaccggggtagatgtcgaacgacacgtcgctgaagcccttgccgggggcgtacaggtgggtgagccggttcaccgacagcagcggggtggtgctcaaaggggtggaagtcatcagtgctgcgcctcttgcgaagattgcgccagctgctgccggcagtagtcggtgtccgaacagacgaacatgcggttgccccgatcgtcgagcaccacctcgtccaggtagctgtggcgcgagccgcacagcgcgcagggttcgtcccactgctgcacgctgaacggatggtcgtcgaagtccaggctctccaccttggtgaatggcggcagggcgtagatgcgtttctcgcgcccggcgccgaacagctgcagcgccggcatcatgtgcattttcgggttgtcgaatttcgggatcggcgacggatccatcacgtagcgatcgttgaccttcaccgggtaggcgtaggtggtggcgatatggccgtagcgcgcgatgtcctcatacagcttaacctgcatcacgccgtactcctccagcgcgtgcattttgcgggtctcggtttcgcgcggttcgataaagcgcagcggctccgggatcggcacctgatagatcaggatctggtcttcgcgcagcgcggtttccggaattcggtgacgggtctggatcagcgtagcctccggcgtgcgctcggtggtttccaccccggcgacgcgctggaagaagcggcggatcgacaccgcgttggtggtgtcgtcggcgccctggtcgatcaccttcagcacgtcggcgcggccgatgacgctggcggtgagctgaatgccgccggtgccccagccgtagggcatcggcatctcgcggccgccgaacggcacctgatagccggggatcgccaccgccttcaagatggcgcggcggatcatgcgcttggtctgctcgtccagataaccgaggttatagccggtcaatacttcactcatcgcgggcctcctgacgctcgctgtattcctgtcgcagccgcttgagcagctccagttcggcctggaagtcgacgtagtgcggcagcttgagatgggagacgaagccggcggcctcgacgttgtcggcgtgggccagcacgaactcttcgtcctgcgccgggccggcgacgccttcgccgtagtcggggctttgcaatgcgcgatccaccaacgccatcgccatcgccttgcgttcggcgcggccgaacaccagcccgtaaccgcgggtgaagtgcggcggatggtccttgggatcgacgaagccgttgaccatttcgcactcggtcagcaggatttcgccgatatcgatggcgaaaccgagctcttcaggcacgatctccaccgaaacgtggccggtgcggatctcgccggcgaacgggtggttgcggccgtagccgcgctgggtggcgtagccgagcgccagcagaaaaccttcgtcgccgcgcaccagctgctgcaggcgcgccgagcgcgagcaggggtaaaccggcggggtgcgggtgatgtcgtccggcgcgctgccgtcgtcctgttcctcccgcgccagctgctggcgacacaacagatcgaacacgtggctgcagttgtccggcagcggttcgtcggcctgcggcgcgcgcggcgcctcgccttccgccagcagcgcgaaatccagcagccggtgggtgtagtcgtaggtcggccccagcacctgcccgccgggcaagtccttgtaaaccgccgagatgcgccgctccagccgcatgttttcgctggccagcggttcgctgaccgccaggcgcggcagggtggtgcgataggcgcgcagcaggaaaatcgcctccaccagatcgccgctggcctgtttgatggccagcgccgccagctcgcgatcgtagatgccgccttcggtcatcacccgatccaccgccagccccagctgctgttcgatttgttccgcgccgagcgccggcagcgcctcgtcgccgcgccgcagctgttcctgcagctgatgggcggcctcaatggctttttcgcccccttttaccgctacgtacatcagcacacctccacgcgggtggtccgcgggatcgccagcaggcgatcgccgcaggtcagcaaaatatccagccccagcgggaagcgctgcgggcggttgaccagataatccagcagcgccggcggcaggcgcggcgctatcaggcgttgcttctcgatgccggggccggtcaggcgcagtgcggcgccgttatccagctcggcaagctgcacgatgaccgtggcgccgcattccggcgagatttcagtgccgtgcggcaacgcctgcagatcggcggcctgaacgtgctcatcgaacagggcaaagcagacctcctgcgccgtggcggccagcggcgcgccgctgtgaaaacgaatgtttgttagcacttgctcacttttaagcgccgcgcacagctgcagcggcgtttcctgatcggccagcgtcagcagcgcggcggtgctggcggcgttcagcggcgcccaggccgggccggccggcagcgtcacccggtggcccggttcgctcaaggctttaagaatcaaacggaaagcgtgctgcgattggtctatcggttgttcaaaaccggtcaataaactcatggcttaatcccctcgcaccagcgtaaagaagtccacccggctggcggcgatcgcccgggcgcgcagctggcgctgttcgtgctgcagcgcggccagcggcgcgatcagctgttgttgcaggcgttcgccgtgttccggctgttgcagcagcgcatcggccagcgcgcacagctcggcgtgcgccttgtcgcgcccggcgatatagctgtagccgtagccgccgttgtccagctgcaccaccgcgcgggtgacggtcatgtcccccagcacgaagcggcggccggtggcgcccatgcgcccctgcagctgggccaggccgatctccggcgcgcggatgctgcggtaacttgggctgaggttcagcgcctgccagtggctgcgcagctgctcgggccggctgtgcgccagcaccgacatccagcgttgtctcgactctaaggcgtgcattcagtgctccatcgtcagttcaatcatgtcggcgcgggccaggctgacggagtattccgccacgtcttcgccgccgctgcggacgttaagggtgcgcacgcacagcagcggcgcgtgggtggcgatctccagcagccggctctctttggcctgcgcgcggcgcgcgctgatgcgcgtctggcggcgggtcagcggctgctgcaggtgctgttcgataaactggtgcagcgaaccgctgtggaactgctgcagcgccggccaccagtccagatcgggcagatagtggtcgatcacgctcatcggcacgccgttgacgcggcgcagggtgcgcaggtggatcaccatttcgccttcttcacgcgagagcgcgctggcgacatgcccattgcacgggcgcaagacagcgagtaagcgctcactggtggggtggctgccctgctcgaacaggttctggctgaagcgggtgttggcgtgcagcgggtagtcataaggccgcatcagcaccagaatgccgacgccgtggcggcgctgcagccagccgcgctccaccagctgatccaccgcgcggcgcagggtgtggcgattgacctgatagcgctcggccaactgctgttcagaaggcaggtagtcgccgcagcggtactgcgtgcgcagctcctgttccagctgcgcggcgatctgctgatagcgggtggggtaagtggtcggatgtctagacaactccatcataataaaaacctcgtcatgccgatggcggtgcgatgaaggcggaagcggtgcgtttcatcgggcgtctaccctgtggttttcaagttggcatcatggtgacgggcgcagatgacaatcgcgttacgcctcggtggcgaacagatgaactatttaggacagcccgggcgtgcacgagcggcggcggcgcgctatgctggcgccactgttgactgactctggccgctaccatgccgcaacctctgaacgcccctgaacacgccccacgcgcctggccgctgtggaaaccgatcctgtttctgctggtggtggccgttggcctctactacgtgaaatggcagccttactacggcaaggccttcgtggcggcggacagccactcgatcggcaaatcgatcctggccgacggcgccgcgagcccctggctggcggcctggcagtacgcgctggtctacttcaccgcggtgtggaaggcggcgctgctcggggtgttgttaggctcgctggtgcaggtgctgatcccgcgcgactggctggcgcgcacgctcggccaccggcgtttttccggcaccgtgctgggggcgctgatcgcgctgccgggcatgatgtgcacctgctgcgccgcgccggttgccgccggcctgcgccgccagtcggtgtccagcggcgccgcgctggccttttggctcgccaacccggtattgaacccggcgacgctggtgtttatggggtttgtgctcggttggccgttcgccgccatccgcctggtggcgggcgtggtgatggtgctgggcatcgcctggctggtgcagcgcgtgaccgccaacgacccgcagcccgccgcgccgcagccgccgctgatgacggcgcagagcgacgaacggccgttcctcgcccgctggggcaaagcgctgtgggcgctgttttggtcgaccatcccgatctacgtgctggcggtgctggcgctgggcgcggcgcgagtctggctgttcccgcacgccgacggcgccgtcgacaatagcctgctgtggatcatcgcgctggcgatcgtcggctgcctgtttgttatccccaccgcggcggaaatcccgatcgtacagaccatgatgctggcgggcatgggcgcaggcccggcactggcgctgctgatgaccctgccggcggtcagcctgccttcgctgctgatgctcaacaaagccttctccgcccgggcgctgtgcctgacggcggcgctggtggcgctgtgcggcgtgctgaccggcgtggtggggatgggattggtgtaacggattcgtgacccgatgctgtctcaaggaggagatggaaatggaacagcggaataaacctgaaatggacttagaggtgatgttgcaggagcaagcgttgcgtgaaaggggggatgccgcccttgaacgtttaagaaacggcaccgcggtttatataagccattcggaggcagaaaaacgaatggctatatttaaagcgaaaattcgggaacgttatcgaggatgatgttgagctgtgctagctcacagctggacttacagtgtctaggggcgctgttggtcggctttgagcgagaatcggacgtttagcaaatattaaaattgattatcaatgttacgactgttcatactggattaattggattgtaatctactattttcatagtgtttctaccagtggttgcttgcttgaaaattgtcccaactggcatttcttcaataattaatcttttaaccttatcttccattctgtaaccaaaaataatagagctcacaaagtcagtatcataattaacctttttaaatttctcacccccgttaatcgtagccagaccttcgctagccataaatcgatattcagactcatactcccattcatctaacttacaatgaagtgcatctaatattctaatgcccaggttattgtccgttgataaatcatagaacgtcttgtataaatcaagtaattctaatgatggtatgtcatccacataactcactcttcttgcttttacatgctcagttttgtattcaatacaaaaacctcgatgagatgccgcataatgtgaccacatcagattgctatctggaatagacgataaggacataaaagcatatgaatcaattcgttcattaaatttgagattaagtttagaaatgaattcatgcccctcaattgtaaaatcacctttattcaggtgttttaacaactcttgacgtttagttttaggaagcagctttgatagctcttttatgtccttgggatttggttttactaaatctattttggaatcaaacaaatcgttgaaattagttctgcttgagaaaaccgcatactgattaaataaagcatctaaatagtaatcacttttcaggtcattataattctcaatgggtctgtatttatatataaatttagggtagttcatgcttttcttatctccataaacaatcttatcaggtttatcctgcaagggtaaaaccaataaaatggttctgcaagaggataaaaatttctgggcgatttgacctcgtaaaatcgtaacgatccgatgttttgaactctatcaattgacgatcatcctatggactcgcggtaagtccgcttctggcacggagctaacggagctgaaggtctgctttgagcgaggagcagacgtttgcgctgcctatttatattaactgttctgcttaaattctttaattctattttccacttttagaattacattggctataattcgttgtgcactttctttacttgtgtatcttaattctcccggatagtttccgctttcaactaattctgaaaacaagttatttctggatgaatcatccgggattccagcttgatcacataaagcatcaaacggactagatactccggtaagagcgatgatttccgagcctttcagtggtgatgtaagtatcacttcactttgactatctttgaaatgaaaaagaggttttgcatcctcaggatatctcttctgaaaatgtgtggctgcttcaataaagtcagagttattccataattcacatagatttacgacaacttcactttctgtaggtgtgtgctcaaaaatcgccgcagaaacagcatctactttaaaaagacctttgaatatctcagcatattttttatctaaagtccaactcactactccttcatgtttttggtctaccaaaacgatttctataagttcaccttggtgaagaaaacgctttctatagcaaggtgaggtgacacttttgaattttttatccaaacactgggttgtatccaataaatccttagctagtaagtcacgtttattctgatcttccctccatccattctgccaatttgagagtgcaaaaaaaaattcatcagtaaaacccatcttcattcctttcttattaaggggtaagttaagcaccttcgtatactttacctaactatgaattatttgaatatagtaatgtccgcttttggcacaaagcagcctgtcagattgactctgtgccatcgttgtatcagttcgaacttgggccaacacatcttgcgatgagcactatcaactcaacgcaacctatgcaccacctggttgctgctgccgcgccagatcagcgccgggtctttcaaatcctgcacgaacttgccgtcgatcagcacgttgatcctgtccaccacctgcatttgctgcgtgtccagctccgccagccggtagccggtccacagccagatatccttgccggggcactcggcgcgcacccgtttcaccagcgttaagatgctcggcacgttggccggatgtagcggatcgccgccggagagcgacagcccctggcgcggcacgcgcgtatcgttcagatcggcgatgatgcggtcttccagcgccggggtaaacggctggccggagttgagccgccaggtgcttttgttgtagcagccggggcactggtgcacgcagccggcgacaaacagcgtgcagcgggtgccggggccgttgaccacgtcgatcgggtagtactggtgataattcatgtgaggcctgcccatcaggctattttactggccattttgcctccgggcagtgctgccaatcctcacgtactgcgtgtacgctgcggttggtgcgcgctggccgaaggcaaactggttgcgacaatcacgcctgatgaacaggcttctgcataggctgcacggcgcttttcagccgagctgcccgttgccgaggtgtttcacccggcgtttcacctcttcctgcttgccggcgttgaacggccgggcatcggggctgccgagatagccgcacacccggcgggtgaccgagaccttggccgagtcgtgattgccgcatttcgggcaggtgaagcctttgctggtgcaggagaattcaccggtgaagccgcattcgtagcactcgtcgatcggcgtgttggtgccgtagtaaggcacccggctgtagctgtagtcccacacgtcttccagcgccttcaggttgtgctgcaggttcgggtattcgccgtagcagatgaagccgccgctggccaacggcgggtagggcgcttcgaagtccagcttgtcgtacggattgaccttcttctccacgtcgaggtggaagctgttggtgtaatagcccttgtcggtgacgcccggcaccacgccgaaatcggcggtgtccagccggcagaagcgatcgcacaggttctcgctcggcgtactgtagaggctgaagccgtagccggtctcgtctttccaggcgtcgacggcggcgcgcagccgcgcgacgatcgccaccgctttggcgcgcagcgcttcgtcgtcatacacgtggttttcgccgccgaacagcgcgttgatggtctcgtgcaggccgatgtagcccagcgaaattgaagcgcggccattcttgaagatatcggcgatattgtcatcggccttgagccgcacgccgcaggcgccttccatgtacaagattggcgccacccgcgccttgatgccttccagccgggcgatgcgcgtcatcagcgcctttttcgccagctgcaggcgctgatccagcagcgtccagaagcgcgactcatcgcccatcgcctccagcgcgatgcgcggcaggttgaggctgatgacgccgatgttgttgcgaccgtcgtgcaccagttcgccgtcctgctcgtaggtgccgaggaagctgcggcagcccatcggcgttttgaacgagccggtgaccttcaccacctgatcgtagttgaggatgtccgggtacatgcgcttgctggcgcactccagcgccagctgcttgatgtcgtagttcggatcgccgtactggtggttgaggccgtcgcggatggcgaacaccagtttggggaacacggcggtcttgcggtttttacccagcccggcgatgcggtttttcaatatcgagcgctggatcaggcgcgactcccagctggtgccgaggccgaaaccgaaggtgacgaacggcgtctggccgttggcggtgtgcagggtgttaacctcgtactccagcgactggaaggcgtcgtaacactctttctcggtgcgcgccatggcatagcctttggcgtccgggatctgccattcttccgccacctgcaggtgtttgcggaagctctcgtcgacgaacggcgccagaatttcatcgatgcggttgatggtggtgccgccatagatatggctggcgacctgggcgatgatctgcgcggtcacggcggtggcggtggagatcgacttcggcggctcaatctcggcgttgcccatcttgaaaccgttggtcagcatgcctttcagatcgatcagcatgcagttgaacatcgggaagaacggcgagtagtcgagatcgtggtagtgaatttcgccgcgttcatgggccagcaccacgtcgcgcggcaggatgtgttgcttggcgtagtgtttggcgacgatgcccgccagcaggtcgcgctgggtggggatcaccttgctgtccttattggcgttttcgttcagcagcgcgcggttgctctgctcgaccaggccgcgaatttcctggttcaggcggccgcgcagctcgcgcgccacgtcgcgatcgtggcggtattcgatataggcgcgcgccagctgtttgtattcgccggccatcagctggttttccaccgcctgctggatctcgtggatatcgacgcgcggctgctgctccatgcgctgagcgaccacgcgggcgacggtggcgcagtagtcggcgtcgaccacgcccaccgccagcgcggcgcgctcgatggcctgcgcaatgcgcgcttcgtcaaaaggtacctggcaaccgtcccgcttaatcactactggtttcacgttgtactccttgttccccgagggagcgttgatacccgcctggcgcggcgagcaaccgtcaaatttcgcttatccacagggcaaagccgcagcgcgcaagggctgtggcgacgtgtggatgattttgtggataactactatatataggtgttcgcaattcttaatgcactatatatagatattggcgcgattcttttgatgtagaacaaggaaaacggaagagcgtgcgcaagctgaacagacgtcaatcgcccgttggccgatcgcgaaaatgttccagcagaaaatccacccagacgcgcacccgcggcggcagatccgccgaggcgtaatagagccacagctgcaccgggcgcggccagcattgcgccagcaccggccgcagcgtgccttgctcgaagtgcttttcaacgtaccagcgcgccaggttgacgatgccgagcccggccagcgccgcatccagcaacatctccgggcggctggccaccagccggccgttcagatccagcgccagcgtttcgccctgatggcgcagctgccatttgacgtggcggccgttgcccgggttacggtgcagcaggcagtcgtggcgcagcagatcgtgcggcgtttgcggctcaccgcaccgtgccagatagtccggcgaggcccccagcaccatatgcatcgggtagagcgggcgggccaccagccggctgtcgggatcgacccggctgccgatgccgacgtcgaagccttcgcccaccaggttcaccacccgggcgtccagcgacagatcgagatcgatctgcggatagcgcgccagaaattgcgggatcaacggcatcagcatctggcggccgaagccggggatcatgctgacgcgcaccaccccggccggcgcctgccgttcgccgccggcgctctccagcgtggccgccagcgcctgccacagcggcgccacctgcgccagcagcgctttgccctcgtcggtcagcagcacgttgtgggtgttgcgctgaaacagccgcagcgccagcttctcttccagcgcgcggatgtttttgctgaccgccgccggcgtcacgcccagctggcgagcggcggcggagaaattttgcgcctgcgcggcggcgaggaaggccggcaacaggcggtgcacgtcaaagggcagcgacatagtggttgatacttttggttgaaattgaagtgacctttaacagcctacacccgaagcggcggaaatggaaaaatgccctcatcttcttatgaccgaggaatcgttatgtcgcgcattttagtgttaaccgcccaccgcacccccgacgagtcgcgcatcaacaaagcgctgatcgcggcgctgagcccgttgcccaacgtgaccgttcacgaactgatccgcgcttacccggattaccgcatcgacgtggcgcgcgagcaggaactgctgcagagccatgatgcggtagtgatgttgttcccgttttattggtacagctcgccggcgatcctcagcgagtggcaggatgcggtattaacctacggttttgcctacggcagcgaaggcacccaactgcacggcaagccgctgcagctggtggtgagcactggcggcaacgcgcaggcctatacggcgcaagggtacaaccgttatccggtgcaggatctgctgctgccgttccacgccatggccaacctgaccggcatggattatctgccgccgcatctggtgcagggtgtgttcgacatgagcgatgaacgcctggcgcaagaggccgccggggtggtggcgttgctggagaaatggtagggcgcagcgctcgccgcgccctgcggggttagtcttcgagcagccaccacaccgcttcgaacggccgcagcgtcagcgcctgaggctggtctgccgagtcgctgtagttgctcatcagcgggcgccactgggcggaaggctccacgcccgccgccgtccaggcctgcggctcgcggcccaggttggccgccaccagcaggcgctggccgttccagctgcgctgatagcaccacagcgccgggtgttccggcgccagatcctgatagtcgccgtgggtcagcagcgggtactgcttgcgcagggtgatcagctggcggtaggcgtaaaacaccgagtcgagatcggccagcgccgcgtcggcgttgatctgcgggtagttctcggcgcagccgatccacggcgtgccggtggtgaaaccggcgtgcggcgcggcgctccactgcatcggcgtgcggccgttgtcgcgtgatttgtcggccaggatcgccagcagctcggcgtcgctgcggccctgggcgcgcagttcggcgtacatgttcaggctttccacgtcgcgatactgctcgatggcgcggaagccggggttggtcatgccgagttcttcgccctgatagatataaggcgtgccctgcatgccgtgcagcaccatcgccagcattttggcggccggcacccgcagtgcgccttcatcgccgaagcgtgacacgatgcgcggctgatcgtggttgcaccagaacagcgcgttccaggcgcggttatgcatcccttgctgccagtggcggaagatctgcttcagttccacgtaatccggcgccgcccgcgtccatttttcaccgccggcgtagtccaccttcaggtggtggaagttgaaggtcatcgacagctcttcgccgctctgcgccgcgtagcgctggcaatgctcaagcgtggtggaggacatctcgcccaccgtcatcaggccgcgcggctgaaacacgtcgcggctcatctcctgcaggaactcgtggatgcgcgggccgtcggtgtagaagcggcggccgtcgccctggctgtcggacgggaagtcctgctgcttggacaccaggttgatcacgtcgaggcgcaggccgtcgacgcctttgtccgcccagaactggcacactttcttcagctcttcgcgcaccggcgggtgttcccagttgagatccgcctgctcggcggcgaacaggtgcaggtagtactggccgctgtcggcgtgccactgccaggcgttgccgccgaacttggaacgccagttgttcggcggcgtatcgccttcgccgtcgcgccagacgtagaactgacgatacgggctgtggcgatcctgtgcggccttgaaccacgggtgctcggtcgaggtgtggttgaacaccatgtccatcacgatgcgaataccgcgctggtgggcggcggcgaccagctgctcgaagtccgccatcgtgccgtaagccggatcgatggcgcagtagtccgccacgtcatagccattgtccacctgtggcgacacgtagaccggcgtcagccagatggcgtcgacgcccagctcctgcagatagtccagccgccgggtcacgccggccaaatcgccgtagccgttgccggtgctgtcctgaaaactcttcggataaatttggtagatgacgccgttctgccaccagggggttgggttgctcatagctgtatacctttgaatcgtgacaacgagcctgcgcgagcaggctcctacattcatattgcgtcaattaaaccggcagctcgccgcgcgcggccttgcgtttgtagaccatgatggtcagcaccagcgggatgacgatcgccaccagaattgccagcgagtaaatcagccagaactgtggtttgatagacaggatgcccggcaggccgccgacaccaatgccgttggccatcacgccgtccaggccgcagataaggccggcgagggcggagccgatcatcgcgcacagcatcgggaagcggtatttgaggttgatgccgtacatcgccggttcggtcacgccgagataggcggagatcgccgccggcaccgagatttcacgctcgttggccttgcggctgatgatgatgatgccgagcactgccgaggcctgcgcgatgttggacagcgcaatcagcggccataccggggtgccgcccatgctctggatcatctgcatgtcgatggccagcgtggtctggtgcacgccggtgatcaccagcggtgcatacaggaagccgaacagcgcggcgcccaccggggcgaagctgccggtcatcaccgctttcaccgcccaggcgacgccgtcgccgatcatgcggccgaacggcccgatcagcgcgtgcgccaggaacaccgccagcagcagcgaaaccaccggcaccaccaccagatagagatagtcggggacgatctttttcagccgggtttcgatccagcccagcgccatgcctgccaggatcgacgggatcacctgcgcctgatagccgactttctggatcacgaaccagccgaagttccacacttccggcgtttgctggccgagcaggtaggagttcatcagctgcggcgacaccagggtgacgcccagcacgatgccgagcaccggggtgccgcccatctttttcaccgtcgaccaacagatggccaccggcaggaacatgaagatcgcttcacccagcagccacaggaagtcgtaaacggttttccacgccgggtgcatctgcgccagcgtttggccgccggacatcgggatgtcgccgatcacgttgcggaagccgaggatcagaccgccgctgatcagcgccggcagcagcgggaagaagatttcggcgaagtgggagatggtgcgctcggtccaggtcatgttctggcgcgccgccaccttggcctgttccttgtcggcctcgttgacgccggtgctggcgatcagcgcctgatagtagtcgccgacgtcggtgccgatcaccacctggaactgcccggcgttggtgaagcagcctttgaccatcggcagctcttcgatttcctttgggctggccttgctggggtcattgaggacgaaacgcagccgggtaatgcaatggctgacggtggcgatgttctcgcggccgccgaccaaaacaatcaggcgatcaatatcctgctgttttactttgctcattatgggatacctgcagaggtgttgactgagtaatgatcaaagcttagccactcggctttttgaatgaaatgggaacgttcccggtttggggcgaggatcacaaaatgacaaaaaatggtcaacttctaatcagggagtcaggaaagtttgctgggcaccaccaggcggcggatcccctgttcgccgctgagctgcgccagcagctgctgcgccgccagcaggccggcgctgccgtagccgaactccaccgacagagtgtcggggaacaggaagctgagcagcggggtgttgccgatggcgcacacctgaatggcgcgcgccggctgctgctgcaggtacttgatcgcgccgagggcgatgctgtcggaggcgcagatcagcgcgctggtgtgcgcatcgatcacttcggcggcgtgctggaaaccgctctggtaactcagctcgcccagcgtggcgcgcggcgtgagcgtgaggcgttcacaggcgtcgagataggcctggtagcggcgctggccggtggtggcgtcgctgagctgcacccccagatagccgatatgccgatgcccctgccggtacagacgatccatcaacaggttcaccgcgccggcgtcgtcgtagcagacggacgagaagccgtcgtattcgcgcaccatcaccaccattttttcctgccacggcttgagcatcgccgcggtcaggccggtgaagccgaacaggatcacgccgtcgacgttgcgctggcgcagtacgtgcaggtgctcctgcaccaggcgggtttcgaactggctctccatcacgatcgggtcgaagccctgttggtacagcagcggcagcatggtgcgcaccgcctggttctccgacggcgaatcgagacgggaaacgatgatgcccaccactttgtcgctttggccgcgcatggcgcgcgccgacttggagggggtaaacccttgctgacggatcaccgcttccacccgttcgcgggtttgcgggctcacgctgccttcattgttcaacacgcgtgagacggtggatttgcctacgccgctcaggcgcgcgatgtccttgatggtcagccggttttgcatggtttacttttcgttgaggtggacaggcgtaacataatggcctgtaaaacaatgcccgtcagcatagctcattttccgacgcggatcttgatgcaaaacgggattgttgcactgcgctgaacggccgctcttgccgctctgtttttccctttaccggaggttataccccatatggaccccgacccgactgctttagacactcactcggttctccggtaaaacctctccgcctggcgctgctgttttaccggtgaaaaacatcacggtaaccggtagcgcgcgcttcgtcgttcgctcctgctgctgaaaaaaataataaggatctgcgttggcagaggctttttggcgcatccgccattcgcccggccgatgacgatccccgtttacccgctgccgtgaggcaccgggcgacgaggtgcgaaccatgaaactgaaaaaactcccccgtcagctgctgggcctgttcgtccgcggcctcccgcgccgtttggtgcgccgcgacagcctgctggacggcgtcagcggcgctgcgcgcgatatgccggccggcctggcgcagcagcggctggaatgcgccgccgcagagacgatgcagctgtttgagcgttttcacagccacccggaaggcatcaccgcccatgaggcggaacaggtgcgccagcgctgtggcgagaacgtcatcgacgatcagcagaaagaggcctggtggcagcacctgtggcactgctaccgcaacccgttcaacctgctgctgaccgcgctcggcatgatctcttacgccaccgaagatctcaccggcgccttggtgatcgcgctgatggtgctgatctccacgctgctgaacttcatccaggaggcgcgctccaaccgggcggccgatgcgctgaaagcgatggtgagcaacaccgccacggtgatccgcagcgatgcgctcaccggcaggagcgagcatgtggagctgccgatcgcgcagctggtgccgggcgatatcatcaagctggcggccggcgacatgatcccggcggatctgcgcgtgctgtcggccaaggatctgttcatcagccaggcggcgctgaccggcgaatcgctgccggtggaaaaatccgccgcgccgcagtcgccggcggccgatccgctcgactgccggaacctgtgcttcatgggcaccaacgtggtcagcggcaccgcgctggcgatggtgatcggcaccggcggcagcacctatttcggccagctggcgcagcgcgtcaccagccaggatgagcagccgaacgccttccagagcggcatcagcaaggtcagctggctgctgatccgttttatgctggtgatgacgccgatcgtgctgctgatcaacggctacaccaagggcgactggtgggaggcggcgctgttcgcgctgtcggtggcggtcgggctgacgccggaaatgctgccgatgatcgtcacctcgacgctggccaaaggggcggtgaaactgtcgcgccagaaggtgatcgtcaaacggctggacgccatccagaacttcggcgcgatggacattctgtgcaccgacaagaccggcaccctgacccaggacaagatcgtgctggagcgccacaccgatgcgttcggcgccggcagcgagcgggtgctgcgctacgcctggctgaacagcttctaccagaccgggctgaaaaacctgctcgacgtggcggtgctgagctgcgcggagcagaatcggcagccggaggcgctgcaaaactaccgcaaggtggatgagatcccgttcgacttcgtgcgccgccgcatgtcggtggtggtggccaaagacaacgagtatcacgagctggtgtgcaagggtgcgctggaagagatgctggcgatttgcagccacgtgcgccacgaagacgaggtgatcccgctcagcgaggcgctgctggcgcgcattcgccgcatcaccgacgatctcaaccagcaggggctgcgggtggtagcagtggccaacaagatcctgccggcgcaaacccatgaatacggcgtggcggatgaatcggatctgatcctcgaaggctacgtcgctttcctcgatccgccgaaggagagcaccgcaccggcgctggcggcgctgaaacagaacggcgtcacggtgaagatcctcaccggcgacaacgagctggtggccgccaaagtgtgccgtgacgtcgggctcgaggccgatcatctgctgcgcggcagcgagatcgagcagatggacgacgagcagctggcgcaggcggcggcgcgcaccacggtgttcgccaagctgacgccgctgcacaaggagcgcatcgtcaaactgctgcgccgtcaggggcacgtggtgggctttatgggcgacggcatcaacgatgcaccggcgctgcgcgcggccgacatcggcatctccgtcgattcggcggtggatatcgccaaggaagcggcggacatcatcctgctggaaaaaagcctgatggtgctggagcagggggtgatcgaagggcgccgcaccttcgccaacatgctgaaatacatcaagatgaccgccagctccaacttcggcaacgtgttcagcgtgctgatcgccagcgccttcctgccgttcctgccgatgttgccgctgcacctgttgattcagaacctgatgtacgacatctcgcagatcgctatcccgttcgataacgtcgacgacgatcagatcacccagccgcagcgctggaactccgccgatctggggcggtttatggtgttctttgggccgatcagttcaattttcgacgtgctgaccttcagtctgatgtggtgggtgttcaaggccaatacgccggaaatgcagacgctgttccagtccggctggttcgtggaagggctgctgtcgcaaacgctgatcgtgcacatgatccgcacgcgcaaaattccatttatccagagccgaccgtcctggccgctgtgcatcatgacgctggcggtgatcgccaccggcatcggcctggtgttctcgccgctggccggcttcctgcagctgcaggcgctgccgctcgcctacttcccgtggctggtactgatcctcgccggttacatggtgctgacccagtgcgtgaaaggctggttcgtgcgccgctacggctggcaataacccgttcgccccctccggccgggagggggcaactgtgatcccgtccgctttttcaccgcaacggttggacatctgttctgtgctgagtctttatctacagcgttggctgttttcccctgcgcctttcaagccaccgcgttgttggctgtacgcccgccccccagttacttagcagacctaagcgcctggggatgcgggcgcttgccgcctagcggtggtttgaaattcattggggatattttgtttttttcctctgaggaatttccgatgcacagacctttccgttatacgctactggcttcatcgttatggttttcttgcggcgcgctggcgcagccggctggcgatctgccgctgatgccctggccgcagcaggttgaagtgacgcaaccggcgggcaaactgattttggatcaccggctgtcgttaagcctccagggcgatgatttgggcgacgcgctgccgcgctggcgccagcgcatcgaactgcagaccggctggacgctggcgccgagggaagaagcgaacggcgcggcgatcaaggtggtgatcaaggatcgggtggcggcgcagccgctgccgggcagcgacgaaagctaccggctggcggtcacgccgcagggcgccacgctgaccgccaacacccgcttcggcgcgctgcgcggcatggagaccctgctgcaactgctgcagaccgatgggcaaaacactttcctgccgctggtggatattcgcgacgtgccgcgttttccgtggcgcggcgtgctgctggattcggcgcgccatttcctgccgctgccggacattctgcgccagcttgacggcatggcggcggccaagctcaacgtattccactggcacctgaccgacgatcagggctggcgcttcgcctccgagcattaccccaaattgcagcagcaggccagcgacggcctgttttacacccgcgagcaaatgcagcaggtggtggcttacgccacggcgcgcggcattcgcgtggtgccggagatagacatgccggggcacgcctccagcatcgcggtggcctatcccgacctgatgagcgcgccggggccgtatcgcatggagcgcgagtggggcgtgcataagccgacgctcgatccgacccgcgacgaggtttatcagtttgtcgacgcgatcgtcggcgagctggcggcgatcttccccgatccttatctgcacatcggcggcgacgaagtggacgccagccagtggcgggcgtcgccgtcgattcaggcgtttatgcagcagaacgggctggcggatacccatgcgctgcaggcctacttcaaccagaagctggaaaagatcctcgagaagcaccagcggcagatggtcggctgggacgagatctaccacccgtcgctgccgcgctcgatcgtcattcaatcctggcaggggcaagactcgctgggcgccagcgcgcaggatggctatcagggcattctctccaccggtttctatctcgatcagccgcaaagcaccgcctatcactaccgcaatgaaattctgccgcagccgctgggggtcgagacggcggtgcagcccggcgagcaggcgcaaagctggtgtttcagcatgccgcgcctgaagggaagcgcggtggaaggcagcttcatgctgatcgagggcaagcagggctggcgcggctttatcgatttcaacggcaagtcacgccgcgcggtgcacgacatcgtctggcgcacgccgcagcaggtgacgttccgcgtcgatacctggatgggcgacacacggccggtgtttacgctgcaacaggacaagctcagcggctatacgctggtcggcaacgtgcgttaccccaccagcggcgacaagctggcggcggcgccggcgggcaagatgccggtggtgccggacgagaaggggcaggccaacattctcggcggcgaagcggcgctgtgggcggaaaacgtgcgcgcgccgctgctcgatctcaagctgtggccgcgcgccttcgcggtggcggagcggctgtggtcggcgcaggacgtcaccgatgaaagcaacatgtaccggcggctggcggcgatcgacgcctggtcggtggtgtcggtcggcctgcagcagcacgcggaaacggcgcgcgaattcacccgcctgagcaacagcgtgcagatcctgccgctgcagatcctggccgaggcggtggagccggcgcagtattacacccgccagcacctgaagttccaagccggcaactatcaccagttcgaaccgctgaaccgctttgccgatgcgctgccgccggaaagtgaggcggtgcgcgccatgcatgcccaggtcgcggccttgttgcaggacaagcgcgataaggcggcggcgcaggcgctgcgcgaacggttgcagcgctggcaggcgaacggcgcggcgctgcagacggcgatcgcgggcaaccgtgcgctgcgggagctggcgccggtggcgcaggacgtcgatgccctggccgcattgggcttaacgctgctggagcgccatcagcagggcaaaccgctgagccgggccgaagcagaacaagtgcagcgccagctggatgcggcggcgcagacgcgcgacgaagtggtgattgcggcggtgtacccgctggaggcgctgctgcgggggctccagccgcaatgaagcggacgggctcgtgtgagcccggatccctacagctgcagcggcggcaactgggtaaaaatgctgaccagcccttcgccccagcccttgcggatggcgctgaagtacggatgatcttcggtaatgcggtattgccgggcatgactgaagctgtcgcgcgggtagatcatcacgtcgagcggcagcccgacggacaggttgctgcgtaaggttgaatccagtgaaatcagcgcgcattgcatcgcttgttccagcggcgtgtcgtagtgcagtacccggtcgatgatcggtttgccgtatttgctttcgcctatctgaaaatagggcgtgtcgcgggtggcttcgataaaattgccttgcgggtagatatggaacagccgcatctcttccccgctaatttggccgccgagcagcaggttgcagctgaagtcggtggtgctgccgctttgctgcgcctcactgtcgcgctggatcacctcgcgcaccgtttcccccaccagcgtggcggcgtcgtagaggctgggagcgttgagcaggttggggcgttcggcgtccttgctgcggtgcaacagtaaactgatgatgctctgagtggtcgccaggttgccggcgctttgcagcaccagcgtgcgatcgccgtcctgttggaacacgtgcagtttgcggaaggtggaaatatgatccaccccggcgttggtgcgcgaatcggacgcaaagaccagcccggacgacaaacgcatggccacacagtaggtcatactacaatccctcaaaacaagactggcacgccgccaacgcgcagcgtgcccgaaacatttgccatcggcaagcggctactggccggttggcatcatttgtacggcggcgatggcgctcatgtcttcgcagccgccgcccaaccgcatgccgcgcaccgggcaggcgtccagataatcgatgccgaccgccagcttaaggtgctgatttggcatgcgcgtattgttggtcacgtcgaagctgtgccagcgttcctccacccacacttccgcccaggcatgggtggcgacatgggtcgagtcttcgctgtacaggtagccgctgacgtagcgcgccgggatgttcagactgcggcagcagctcaggaagacatgcgtatgatcctgacacacgccgctgccggcggcgaacgcctcggcggcgctgtcggtcacgcgcgtggagcctgggctgtaaggcatcttcagcagcagctcgcccatcagatgttccaggccgctcagcaccgcctgcggttggtgataacgcagggcgaaggcctgaatggcgtcatcgggctgggtcagcgggctatggcgcagaaataccagcggcgacagatgcccgagcgcccgatcttcgacgccgtcttcaatctccacttccccgagcacccgaatggtgatggcctgatgcggttcatcgagcgtcagcacgtgcagtacgttgccgaaggcgtcggtggtgcgcaccgcgtcatccggcaacgacagttgccaggagaggatgcgctgatgcggcgaatcctgcggcgtcagccgcagatattgggtgctgcgctgcaccggctgggcgtagcgataatgggtgttgtgctcaatattcagtttcattgcgcctccagataagtgtgatggatgctttcggcgatgccgttcacctggccgagaaaggcgctcaaccactctcccaggccgatcttgttcagatccttcatgctgctgaagcgcagctcggcatgcagggtgtgtgccagacgtcgcggttggttggcgccgccgccgatcagttccaattgctgcaccatgtcgccgacgcaggccagcagtgaacgcgggatttcattgcgcagaatcatcagttcggcgatggtctcgcggctcaacggctgcttgtagatgctgtggtaggcttcgcgcgcgctcaccgcccgcagcagcgtgtccatgcggtaatattcgcgcaccgggtcgccgtcgatgtccatcagcgtgttcttcacctccagcagacgggcggtgccgtcggcccgctccagcagggtgccgagacggataaagcgcatggcgtcgctgcgcagcagcgtgccgaacatggcgccgcgaaacagatgggcgcgctccttcacccagtcgaagaaggcatcggcgcccaccgagccgatgccctggcggcggatcagtttcatctctatccaggtggcgttgatgcactcccagacttcggacgacaggctgccgcgcaccgcgtgggcgttgttccagcccatttgcaggcagctgaagatgctgctgtggttgcggttgtcgagcgcgaagaaactgaccagattcggcatcgtcaattccgggtaggcggcggcatacagctggccggtgccggtcagattgagcggcacctgcagatcctgatcgccgccgtcgcggatcggcatcatcgacagcttgttggtgacgtccagcacccgggcgatgctttccgcccgctccagatagcgggccatccaatagagttcactggcggtgcggctcagcataggtcgtcctccaatacccaggtgtccttggtgccgccgccctgcgacgagttcaccaccagcgaaccttccgccaacgccactcgggtcaggccgccgggcaccaggcggatctccgcgccgctgagggcgaacggccgcagatcgatatgccgcggcgccagaccgtcgttgacgaaggtcgggcaggtggacagcgccagcgtgttttgcgcaatgtaattctgcgggcgagccagcagcagcgcacggaatcgggcgagctcgtccttgctcgccgtagggccgatcaacatgccgtagccgccggcgccgtgcacctctttcacgaccatctgttcgaggttggccagcacatacgacagttcgtttttatgtcggcactgccaggttggcacgttgttgaggatcggttcctcttgcaggtagaagcgcaccatatccggcacgtaggggtagatcgatttgtcgtcggccacgccggtgccgatggcgttggccagcaccacattgccggcgcgatacaccgacagcagccccggtacgccgagcatcgagtccggccgaaacgccagcggatcgaggaaggcgtcgtccacccgacgatagatcacgtccactttgcacggcccggcggtggtgcgcatgaacaccgcgccgtccttgacgaacagatcggcgctttcgaccagctccacccccatctgctgcgccaggaaactgtgctcaaaataggcgctgttgaagcggcccggcgtcagcaccaccacggtgggatcgttgatgggcgagctttcgcgcagcgtttgcagcaggtgcgacgggtagcgctccaccggcgcgatgcgttgccgggcgaacagttccggatacagacgcatcatcattttgcggttttccagcatgtaagagacgccggacggggtgcgcaagttatcttccagcacgtagtattggccgtcgctgttgcggaccatgtccacgccgacgatatgcgcatagatatcgcgatgcagatcaacaccttgcatacagggttgatactgatcgttggccagcacctgttctgccggaatgaggccggccttcagaatatgctgctggtggtaaatgtcgtgcaggaaagcgttgagcgcctgtacgcgctggcgaatgccgcgatcgagcatcgcccattcggcggccggaataatgcgcggcacgctgtcgaacgggatcaaccgctcggcgccgtcatcgtcgccgtagacgttgaaggtgatgcccacccggtgaaacagcagcgcagcctcttcccgcttgcgttgcacggcctggtgatcggcctgctgcagccattgccagtaggcgtcgtagtggccacggtgttttccctcagccagaagcatctcatcaaaaaacggtgaagcggaaagattgatattcagcatcgtcacctcgtcgacattgcaggctgtcaatcaatcgagcataaaacgtgccaaggcgataacgggcgaaaatggcgcagagcggggctgccgcgatgaaaaacgcccgtttgcggtgcaggtgcggcctagcgacgccttaatatagggcgaaatggcggtggcggtgagcgctgaaggcgcagggacggcaggctgtcggggcagagcagaaataaaaacggccagtctgcactggccgtcattcgcgtgcgcgtcgattaacgacgcacggcgatggcttcgatttcgatcttcacgtctttcggcagacgcgccacttccacgcaggagcgggccgggaacggcgcgctgtgctcggtgaagaaggcttcgtacgcggcgttgacggtggcgaagtcgttcaggtctttcacgaacacggtggttttcacgatgtcggcaacgctcaggccggcggcttcgacgatcgccttgacgttttccagcgactggcgcgcctgagcggccacgtcgtcggcgacggcgccggttttcggatcgaccgggatttggccggaagtgatgatcatgctgcccagatcaacgccctgcacgtaaggaccaatggctgccggggcgagttcagtgctgatgttacgtgacatgttttctcctgataaacgaggattgttctatccagaaatcccattatagggcgtcaccgggagaataacagcgccatctcccggcgcccataccgggcttagtcggcctgcagcaccacctggtgctcgaactctttttcgcagtagcggcacttcaggtgcacttcgccgccgcgcgatttgacgctgaagctcgacgccactggctcgctgcggctgatgcagttgccattcgggcaggtcagcacgccgtcgatgtggtccggcaggctaagggtcagtttgcgcaccacttcatagttgtcgatgcggttcaccgtggccttcggcgcgtacatcgccagctggttggcctgctgctcggtcaggaaggtgttctcgatcttgatcagatccttgcggcccagctcgttggaaggcaggttcaggccgatggtgatgcgctggtcggtggcggtcagcttgaacagcgtcagcagtttgaaaccgatctgcgccggaatgtggtcgatcaccgtgccgcatttgatcgcttcgacctgcagtttgttgtcgtgagtcatggcggttcccccttaaagagccaaatctgcgttgagcaccagcgccagcagcgcctggcgggcgaagatgccgttgcccgcctgctggaagtagtaagcgtgcggcgttttatccacgtcggtggcgatctcgtcgatgcgcggcagcgggtgcagcaccttgaggttggcgcgcgcgccggccagatccgcggcgcgcagcacgaactgcgccttcacgttggcgtactcggacggatcgaggcgctctttctgcacccgggtcatgtagagaatatccagctccggcaccacttcttcaatgctgccgtgcaggctgtactcgatgcctttctcgtccagcattttcaggatgtaggccggcatcgccagcgcgtccggggcgatgaagtagaagcggttgccttcgaacttggccagcgcctgagtgagcgagtgcacggtgcggccgtacttcaggtcgccgaccatggcgatgctgaggttgctcaggcggccctgggtttcctggatggtgaacagatccagcagggtttgggtcgggtgctggttggcgccatcgccggcattgagcaccggcacgttgccggagaactccgaggccatgcgcgccgcgccttcctgcggatggcgcatcacgatggcatccacgtaggtgctgatcaccgagatggtgtcggccagggtttcgcctttcttgccgagcgaggtgttgctgccgtcggcgaaaccgaccaccgaggcgccgaggcggtgcatcgaggtttcgaacgacaggcgggtacgggtcgaggcttcaaagaagcagctggcgatcaccttgtgtttcaacagttccggctgcgggttgtctttcagaccggcggcggtgcgcagcaccagctccagatcctcgcggctgagatcgttaatagagatgatgtgtttgtgatacagcgggttggccatttttcactcctcctcgacgcgtgcccgtggcgcgggactttgggatattctcaaggcaaaaaaaagcccctcaatgaggggcttgaaacgatcggtttagcaacaggagaaacaacggcagctggccgccgataggcagtcggttttgtcgattgcggctaacaaaacaaacgtcgtttttcatgctttctcctggcaaattgtggcgcattatactcgcgctttttgccactgcaagcgttaaaacgccgttttttgccgccccgcaatcgattggccggcgatggccgcccgccggctatttgctgacgcgatcgtagtagaccatgtcggcgttcagcccttgttgatagcctttgacgttgtcgcgcagcaccacttcggttttggcctgatcgataaacacgtacggcgaactgcgctgcagctcctgctgcatggcggtgtacagcgcgcggcgcttggccggatcggcttcggccagcgccgccagcgtctgcttattcaactgcgggatctgccagccgttcagcccggccaccgtgctgctcttgccgtcgttgtaggcgaaggcgctggcgttggagtgggcgtcgaagtaatccgggatccacaggcggatcgccgcctgatgctgcctggcgcgcacgcgggagtaaacctggctgcccgcggccggcagcagctcgatcttcacgccggcggcggcgaagctgccctgcagcgcctgcgcgatggtgatgaacggcggtttgttctccacgtccagcgtaaaggcggcgtgggtgatgcccgccttggccaggatggctttcgccttggccggatcgtagctgaacgggttggtctccagcgcgcccggcagcccgaccggcaggaagctctggtgcacgaagtattgtcccttcagcagatccttcgtgatgccttgataatccaccaggtagcgcgccgcctcccagaaggccgggttgttcagcagcggattggcgccgttgccggcgttgaacaccaggtagttttgttcggcggacgggatctccagcaccttgacgccgggctgattcttcagcgtatcggtctggtcggcgcccagttcgcgggcgatatcggcgtcgccctgctggagcagcaggcggcgggtagccggatccggcacgtttttaatgatgatgtttttcagctgcggcttgtcgcccggcgtggcgggattggcgtccagcacgatcgcctgatgcggctgatagacgcgcatcttgaacgggccgctgccggcggagtgcatcttcagccaggcgttgccgaagtcgccgtctttgacgttggccagcgccgctttgctgtcgacgatcgaggcgatcggcgtcgagaggatattcagcgccaccgccgggctgacgtccgccgtccagcgcagctgcacggtatgttcgtcgatcttcttgagctgcgcgtcgatgttgtccggctgccaaccgagcacgttgaggatgaacgccggcgatttgttcatcttgaccgcgcggctgtaggagaagatcacgtcgtcggcggtcagcgggttgccggaggcgaacgccgcctgcggccgcagtttcaccgtcagcgttttggccgccgtatcgctttgccagctttccgccagcaccggcgccaccttggccggatcgtcgcgatccgcctgcaccaatcgttgatacaggctgggcaccgtctggatgctggagagttcgttggcttccgccggatcgaggctgacgatgtcatccagcgattgcaccaccaccagcgtattcggcggcgtggcggctaacgcggcggcgggcagggcggcgagcaggaacagcggcaagagtttggctttcatcggtgtatatcccctgaaggcgccacaaggtggcgctgagaacggtttgttatcgttggtttttacggcgcgggcgccgtcggcctgtcacggtagaacctttgccggtggtgggcaaaggtcaatgcgctatttgatattcctggaatatattagccgccctggccgggggcgccagggcggtggaggaggattgtcagagggtttcgctcagcgtggcgaccagcaccgccttgatggtatgcagccggttttccgcctgatcgaacaccacgctgtgcgccgactcgaacacttcgtcggtcacttccatgccgccgtgcagatcgtactgttgcgccatctgcttgccgagcgtggtttggtcgtcgtggaacgccggcaggcagtgcaggaacttcacgttcgggttgccggtcagtttcagcatcgccatgttgacctgatacggccgcagcagcgcaatacgctcctgccaggtctctttcggttcgcccatcgacacccagacgtcggtgtagaggaagtcggcgtcttgcaccccttcggcgatgtcttcggtcagggtgagtttcgcgccggtttgttgcgccagcgcctggcactcggccaccagctccggctgcggccagcaggccttcggcgccaccaaccgcagatccatgcccgccagcgcggcggcttccagcagcgtgttgcccatgttgttgcgcgcgtcgccgacgtacgccagcttcacttcgttcagcgccttgcccggcaggtgttcctgcacggtgagcagatccgccagcagctgggtggggtggaactcgtcggtcaggccgttccacaccggcacgccggcgtgctgcgccagggtttccaccagcgcctggccgtaaccgcgatactgaataccgtcgtacaggcggcccagcacccgggcggtgtctttcatcgactctttatggccgatctggctgccgcttgggccgagataggtcacctgcgcaccctgatcgaatgcggcaacttcgaaagagcatcgcgtgcgggtcgagtctttttcgaagatgagcgcaatgtttttgccctgcagccggcgctgttcccgcccctgcttcttggcctgtttcagatcggccgccagcttcagcagcgcctgcagttcggcgggggtgaaatccattaacctcagaaagtgacgttggtagaacgcattgccggtgctcatagtccgattccctgattgcttaattgaattaaaattcactttatatgtatgaatattcaatttcaaccccggcgaggaaatctttcacgtttatcgtggaagcaatgtcggcggtgtgtgaaaatagaaggaatgaaggccatttgacttgaggatataggcatggcaaaccgcgaattgctggaagaacaacgtgaagagacccgcctgatcatcgaagaactgctggaagacggcagcgatccggacgcgctctacaccatcgagcaccatctgtccgccgagaaatttgaggttctggagcaggccgccgttgaagccttcaagctgggctacgaagtgaccgacgccgaagagctggaagtggaagacggttcgctggtgatgtgctgcgacgtgatcagcgaagtcggcctgaacgccgagctgatcgacgcccaggtcgagcagttggtggcgctggcggaacgctgcggcgtcaactacgacggctggggcacctacttcgaagatccgaacggtgaagacggtgaggatgacgaagacggcgactacatcgacgaagacgacgacggcaaacgccactgattcctttccgattaatgcctgtgggccggctctcgccggcccctgataaacgccatgacataccaatccctgctagccccgattttaagcttcctgcactgtgaaacccccgacgcctggatcgacgccgcgcgccgtccggaaaatctgcagctattgctgaccgaccacctggtgtgtgagctgaaagccgcgcagaccggcatgtggctgatccgccgttacgtggcggacaaagagagcggcgacgcgctgttggcgctgctgcggccctacgaggcgtttctgcacgaagcgcagggcgcgccggacacgctgttccgccagggccagttcacccgcaagatcctgccgaaaaacggctcggcctacggccaggatctggcggatcgcatggtgctgttgatcaaggaagagctgcatcacttctcgcaggtgctggagatcatgcaggcgcgcgggatcccgtatcgcaagatcaccgccagccgctacgccaagggcatgatccgcgagatccgtacccacgatccggcgacgttgatcgacaaactgatctgtggcgcctacatcgaagcgcgatcctgcgaacgcttcgccaagctggcgccacacctggacgatgagctgaaccgcttttacgtctcgctgctgcgatccgaagcgcgccattatcaggactacctgacattggccgagcagatcgccggcggcgacatcagcgaacgggtggcgcatttcggccgcctcgaagctgaactgatcctgtcgccggacagcgagctgcgcttccacagcggcgtgcccgccgccgcctgaggttgaggcgcgcccttactgcggcgcgcccagcagcagatccaccgccttttccgccagcatgatggtcggcgcattggtgttgccgctggtgagctgcggcatcaccgagcagtcgatcacccgcagctgctcgaaaccgtgcacccgcagctgcggatcggtcaccgcgtcctggggcgacggccccatgcggcagctgcccaccgggtgatacaccgtcttgcagaagttgcgcacgaactcctccagctgcgcttcgtcgcgcgtccactccggctgcggcatcagcagatctttgatcagcggcttcagcgccgcggtttgcaggaaatccaggccgaacttcaccgcgcgcacgctgccggccagatcgtccgggtggccgaggtagttggcgtgcagcttgaccggatcgcgcgggttgctgctgcgcagcagcacttcgccgcgcgccttcggctgcaggtaaccgaccttgagcgtaaagccgtgaatgttcggcagcggctcgccgggcacgtcgtcccagctgtccagcagcggcaggaagtggatctgcacgtccggccggccgtcgccctggctgtcggtgaaggcggcgccttccagcacgttggacgagagcaccccgctgcgaaacgccagccactgcgcgccgtggctcagcgcctgcaggccgcgatcggcgccgaacaggctgatcggctcgcgggtgctgacgttgatcgacatgtgcagatggtcatggaagtttttgcccaccggcagatccacccgcacctcgatgcccaactgctgcaggtggtcacgcgggccgatgccggacagcatcagcagcttcggcgaaccgaccgcgccggcgctgacgatcacctctttggtggcgcgcgcggtgacttccgcgccgccattctggctgtagaccacgccggtggcgacgttgccctcgaaggtcagccggtgcgccagggcgttcagtttcaccaccagccgccgttcgtcgcgcaccgccttcaggtaggtgcgggcggtgctggcgcgctcgccgttgtgggtggtggtttggtagaaaccgacgccgtgctggctgtcgccgttgaagtcgttgcgatagggcaggttcagctcctggccggcgcggataaacgccatgctgagcgggtggcggtagcgattctcgctgaccggcagcagcccgtcggcgccgtggtagtcgtccgacaggctttcgttggcttcggcgcgtttgaagtagggcagcacctcgcggtagctccagccggtgcagccgtagcgctcggcccagtcgtcgtagtcctgcggctggccgcgcaggtagatcatgccgttgaccgaactgctgccgcccagcaccttgccctgcgcgatctgcatgcggcggttattggcgtgcggttccggctccgtttcatagggccagctttttttggcgatgatcttggccaccccggccggcatcttaatgaacaggttattgtcgtcgccgccggcttccagcagcagcacccgcgcctgggtgcggcggatcagctgcgccgccagcacgcagccggcggaaccggcgccgacgatgatgtaatcaaaggtattttccgacatgacagctctccgtgcgcgattgggatactggcagagtaacgcgggggaaaaggcggtcaatttgcgatcgttaatttattaacgaacttcacattaaatttacatcgtggtttttaacgtcagtttatctgcttgaaaaacggcgttatagcgagttttactgattgattgcgatattaataaaaaaggcgcagcaagctgcgccctgatgaagaggcgggggaggattacagcgttttcagcatggtgacttcacaatcgacgtggccggtggcgcccatcgtatggtcgatgtgttcgaagcccagatgttcgtacagcgcaacggcctgcgtcaggctggcggtggtctcgaggtaacaacagcggaagccgtgctggcgggcgaaatccagcgcctgcagcgccaggcgtttcgccaatcccttgccgcgcaacaccggcaggaaatacatcttctgcaattcgcaaatatcgtctgcgccgccctgcagcggcgcgatgccgccgccgccggcgacctggccgtccatctcgatcacccagtaagcgctgcgcggcaggctatagagctgatacagggcatccaggttgggatcggagacggtatagcctttatccgccgtcaggccgtgctcggcggagacttcgcgaatgacgtgagcaatggcggcattgtcttccgccgtgatggggcgcaccagcaggcgcgccggagttgctgttgtcatgtttacactcgccattgaaagagaccacgttcgtttttcgtttttatcgcagcgcgaaacgcgccgggggttatttcccggcggcgtccctgcagcagtaatatcttgtaataacatctaacccggcccggatgcaacggcgataaaaaaacagcggggaagaccccgctgttttcaggcgttggcgtgagccggtggattacagcgcggcgatggtcgcctgctgttcctgcagcttcactttgccttctttgcaggccgccaggcgatcgcgctctttggcgaccaccgcttccggcgcgcgcgccacgaagccttcgttcgccagcttgccttcgatcgaagcgatttccgcatccagcttgcccatctctttggccagacgcgcgatctcggcgtccttgtcgatgaaaccggccatcgggatcagcagctcggcgccgtccaccagcttggtgacggagaccgggcctttctcaccggccggcagcagcgcgatggatcccaggcgcgccaggcgggcgataaagttctggttctcctgcacgcggcgctgggcgtcggcgctgcagttgcgcagcagcacgtcgagcgctttgcttggcgcgatgttcatctcggcgcggatgttgcgcacggcgatgatggtttgcttgatccactccagatcgttcagcgcctgctcgtcttccagcgcggcgtcgtaggccgggaacggctgcagcatgatggtgtctgcggtcgtgccggtcagcggcttcacgcgctgccagatggtttcggtgatgaacggaatgatcgggtgcgccaggcgcagcagcgcttccagcacggtgatcagcgtgtggcgggtgccgcgctgttccgcttcgctgccgttgctcacgacaggcttggtcagctccagataccagtcgcagaactggttccaggtgaattcgtacaggatgttggccgccagatcgaagcggtaggtatccagcgcttcgcggtaggctttcaccgtgcggttgaattcggccaggatccagcgatccgccagcgacagcactttctcgccgccgttgaagccgcagtcgtgcgcttcggtgttcatcagcacgaagcggctggcgttccacagcttgttacagaagttgcggtagccttccaggcgcttcatgtcccagttgatgtcgcggccggtcgaggccagcgccgccagggtgaagcgcagggcgtcggtgccgtgcggctcgatgccgttcgggaattgcttctcggtgcgcttgcggatcttctccgccagctgcggctgcatcatgttgccggtgcgtttttccagcagatcttccagcgagatgccgtcgaccatgtccagcggatcgatcacgttgcctttcgacttggacatcttctggccttcgtcgtcgcggataagaccggtcatgtagacggtcttgaacggcacctgcggcttgccgttttcatccttgatgaagtgcatggtcagcatgatcatgcgcgcgatccagaagaagatgatgtcgaagccgctgaccatcacgctggtcgggtggaaggttttcagcgcgtcggtctgctccggccagcccagggtggagaaggtccacaggccggacgagaaccaggtgtccagcacgtcttcgtcctgggtcagcaccacgtcggcgcccaggttgttctcgctgcgcacttcttcttcgctgcggcccacgtagactttgccgttcacgtcataccaggccgggatgcggtggccccaccacagctgacgagagatgcaccagtcctgaatgtcgcgcatccagctgaagtacatgttttcgtactgcttcggcacgaactcgatttggccctgttcgaccgcttccaccgccactttggccagcggcgcggtgcgcacgtaccattggtcggtcagcatcggctcgatcaccacgccgccgcggtcgccgtaaggcaccgtcagatcgtgcggtttaatctcgtccagcaggcccagattttcgaaggtggcaaccaccgctttacgcgccgcgaagcgctccaggccgcggaactcggccgggatctcgttgcagtagtcggtgcagacttcgcccagggtgttgaacacttccgcttcctgacggatgtcgccgtcgaaggtcagaatgttgatcatcggcaggccgtggcgtttgccgacttcgtagtcgttgaaatcgtgcgccggggtgatcttcacgcagccggtgcctttttccatatcggcgtgttcgtcgccgacgatgcggatgcggcggccgaccagcggcagaataatctctttgccgatcaggtctttatagcgcggatcttccgggttgaccgccacgccggtatcgcccagcacggtttccggacgggtggtggcgaccaccaggtagtctttgccctcggcggttttcgcgccgtcggccagcgggtagcgcaggtgccacatcgagcctttggattcgcggttttccacttccagatcggagatggcggtgcgcagcttcggatcccagttcaccaggcgcttgccgcggtagatcagatcttctttgtgcagacggacaaacacttcgcgcaccgcgttcgacaggccttcgtccatggtgaagcgctcgcgctcccagtccacggagttgcccagacggcgcatctggcgggtgatggtgccgccggattccgctttccactgccagatcttgtcgatgaacgcgtcacggccgtagtcgtggcgggttttgccttcttctgcggcgatcttgcgttccaccaccatctgggtggcgatgccggcatggtcggtgcccgcctgccacagggtgtttttaccctgcatgcgctgatagcgaatcatggtgtccatgatggtctgctggaacgcgtggcccatgtgcaggctgccggtgacgttcggcggcgggatcatgatgcagaagctttcctggctggtatcgccgttcggcttgaagtaaccctgattctcccagtgatcgtacagcttctgttcgatctgttttgggtcgtatgcggtatcgagctgactgtttgtcttttccattctttatcgtattcagtgagttggcggcgtagccgtggtcaaatggaagccgacgctgcgataggccttgtaacggtcgcgcgccaactgtttcagagtgtcttcgtaaggaacgaagtctaccacttcatggaaagcggtagcaaaatcggcaaactgcggcagcagggcgatcagcagatcgcgcggggcgttgccgcgcttgccgggccagcacagttccaccggcgcgccgtagtgcggcccttcgccggccaggttgtgcggcacgaattcatgcggctcgcgctgccacagcgcttcgtccagccgctgggcctgctcctggctctcgcaggcgatcagcacccgcttgccggtgcgccagcgttcggcggcaacggcgcaggccacggcctcatgggcgctgagcgcgcctgacggttccgcgttgtcgagcaaataaaacgtcgcctgtttcattaaggatccaccgctgccgataaaaaaacagggcacaacatgtaggttgcgccctttttgggaacggagcagataactctaccccttcgctgctgagaggattatatacccaatagatttcaagttgcagctaggcggcaagttcgttcatccccaggagctgacatcaagtcagtgactggggtgaacgaatgcgggcaacaacgctgcggcttgaaagatgaagggtatttaatcgtcgccgttcaggcctgcacggttgagcaagaactgcgacagcagcgctaccgggcggccggtcgcgcccttggctttaccggagcgccaggcggtgccggcgatatccaggtgcgcccaggtgtacttgcgggtgaagcgcgacaggaagcaggcggcggtgatggcgccgcctgggcggccaccgatgttcgccatgtcggcgaagttggagtccagctgctcgtaatactcgtcggccatcggcaaacgccaggcgcggtcgccggcctgctcggaagcgcccagcagctcgtgcgccagcgggttgtggttcgacatcaggccggtgatgtggtggcccagggcgatcacgcaggcgccggtcagggtggcgatgtcgatcaccagctccggctcgaagcgctcgacgtaggtcagggtatcgcacagcaccagacggccttcggcgtcggtgttgagcacctcgacggtctggccggacatggtggtcagcacgtcgcccggacggtacgcccggccgcccggcatgttttcacagccggccagcacgccgatcacgttcagcggcaggttcagttccgccaccacgcgcatcacgccgtacacggtcgccgcgccgcacatgtcgtatttcatctcgtccatgccgtcggccggtttgatcgagatgccgccggagtcgaaggtcagccctttgcctaccagcacgatcggcttagcgtccggatttgggttgcccttatattccatcaccgacatcaatgattcgttctgcgaaccggcgccgaccgccagataggcgttcatgcccagctctttcatctgctgttcgccgatgacgcgggtggtgatgttggtgctgaaggcgtccgccagctgacgggcctgcgaggccaggtagccggcgttacagatgttcggcggcatgttgccgagatctttggccgccttgatgccggaagccaccgccaggccgtgctggatagcgcgctcgccgctggtgagctcacggcgggtcggcacgttgaacaccattttgcgcagcggacgacgcggctccaccttgttgcttttcagctgatcgaaggtgtagagcgtctctttggcggtttccaccgcctgacgcactttccagtaggtgttgcggcctttcacgtgcagctcggtcaggaagcagaccgcttccattgagccggtgtcgttgagggtattgatggttttctggatcacctgcttgtattggcgctcatcgagctcgcgctctttgccgcagccgatcagcaggatgcgctcggagagaatgttgggcacatggtgcagtagcagcgtctgcccgaccttgccttccagttcgccacggcgcagcaatgcgctgatataaccatcactgattttgtcgagttgttctgcgataggggacaggcggcgcggttcgaaaacgccgactacaatacaggcactgcgctgtttttccgggctaccgctttttacactgaactccatgcactctcctgaatcttaaagacaaaggcggacgctacggctagaataatcgactccgtaacgatctcccgccatttgagttaacggattatgttaacctgaacggcgtaaattgctctgttttggcgactataagcaagttcctataggacacccaaacggcttgatgttgtaatactattttagctgtgaaggttgccatatgatgagaataaatggcggattagcgatgaaattatcgattttcctgcaaaaagacaagttttcacaggcgtaataagcgtgatcatcataagatatctggtacgggaaacgctcaagagccaaatcgccatcctgttcatcctgcttctgatcttcttttgtcagaacctggtcagggtgttgggcgacgcggtggacggcaatatcccgacaaacttagtactctctctgctcgctctgggcgtgccgaagatggcgcagctcatcctgcctttgagcctgtttctcggcttgttgatgacgcttgggcggttgtataccgagagcgaaatcaccgtcatgcacgcctgcgggctgggcaaacgcaccctgattattgccgccatgatcctggcgctgttcacctctgcggtcgcggcgatgaacgtgttttgggccggcccctgggcctcgcgctatcaggacgtggtggtgaacgaagccaaggccaacccgagcatcgccgggctggcggaagggcagttcaaaccctcgcaggacggcaacgcggtgctgtttatcggcaacgtgaagggcagcacctttaacgacgtgttcctggcgcagctgcggccgaacggcaaccaacgcccgtcggtggtggtggccgagcacggcaacatcgtgcagcagaaagacggctcgcaggtggtgacgctcgacaagggcacccgttttgaaggcaccgcgctgctgcgcgacttccgcattaccgacttcaccgactacaaggcggtgattggccaccgcaccgtggcggcggacaacaccgaatccgaacagatgtcgatgcagacgctgtgggaatccgacgatccggacgcgcgcgccgagttccactggcgcctgacgctggtggtgtcggtggcgctgatggcgctgctggtggtgccgctcagcgtggtgaacccgcgccagggccgcgtgctgagcatgctgccggccatcctgctgtatctgatcttcttcctgctgcagacctcgctgcgctccaatgccggcaagggcaagctggatccgatgctgtggctgtggctggttaacggcgtttacttcgtgatcgcgctggcgctgaacctgtgggataccgtgccgatgcgcaagctgcgcgcacgcctgagaggagcggcctgatgtttggcgtattagaccggtatatcggtaaaacgattttcaacaccatcatcatgacgctgttcatgctggtgtcgctgtccggcatcatcaagttcgtcgatcagctgcgcaaggtcggccagggcgaatacaccgcgctgagcgccggcatgtacaccctgctgagcgtgccgaaagacatcgagatcttcttcccgatggcagcgctgcttggcgcgctgctcggcctgggccaactggcgacgcgcagcgaactggtggtgatgcaggcttccggcttcacccgcctgcagatcgccggctcggtgatgaaaaccgccattccgctggtgctgctgaccatggcgatcggcgagtgggtggcgccgcagggcgagcagatggcgcgcaactaccgcgcccagcagatgtacggcggctcgctgctctccaccaagagcgggctgtgggcgaaggacggcaacgacttcatctacatcgagcgcgtctccggcgataaagaactctccggcgtgaacatctaccacttcaacgatcagcgtcgcctggaaacggtgcgctatgcggctaccgccagcttcgagaacggcctgtggcagctttcgcaggtggacacctcggatctgaccaacccgaaacaggtgaccggcacccagacgctgaccggcgaatggaaaaccaacctgaccccggacaaactgggcgtggtggcgctggatccggattcgctctccatcagcgggctgcacaactacgtgaagtacctgaagcagagcggccaggaagccagccgttaccagctcaacatgtggagcaaaatcttctcgccgctgtcggtggcggtgatgatgctgatggcgctgtcgttcatcttcggcccgctgcgcagcgtgccgatgggcatccgcgtggtgaccggcatcagcttcggcttcctgttctacgtgctggatcagattttcggcccgctgagcctggtgtacagcatgccgccggtgctgggcgcgctgctgccgagcatgctgttcctgctgatcagcgtgtatatgctgctcaaacgcaagtagcggggcgaacggtagtgaagaaaggcgtggccgtggggcctcgccttttttgttggtgtggcatgccccccgcctgcggtttttgtcgtgctatagtcacttcagcagcaatgcaggagagggagcaggcagccaatggaagacgaatataatctcagcaacattatcggcaagcgcctggaggcggcattaggagagttgggcgatctcctgtgggcgtatgtggtcctatccaaaaaagacattgcctgcatctttggcgtcaccaactacccgagtgaatgggtaaaaaagtaccaagagcagggattgcagtacattgatccggtagtgcttaccgcccgcaaccgcctgaccccgttcgcctgggacgagcaaatcatggccgacgcggggctgcactttcctgagttgtttgaacaggcccgcgagtttggcgtaacgcacggctataccttcgtgctgcacgattacaacgacaatcttgtcacgctttcctttgccttcaaccttgagcagagagtggaggccatccaggcactcaccgatcgtaaaggcgatatttcggtattgctggcctcaatccatgagtcgtacctggcgctgtccccactgtcagcaaaaaacgccgcagccctagagagaaacgcccgctttaccgacagggaaaacgagatcctctattgggccagcgtgggtaaaacctaccaggaaacggcgatgatcctcggtataaagaccggcaccatcaagtttcatatgtccaacgtcgtcaaaaaattgggggtcacgaatgcccgacatgccgtgcgcctggggatggagctgcggctgattaaaccggtggagtgatgggctagctagcctgtggaatactgaggcaacgactgcgcagaactcatcagccgggatacgtctaaatggagaaaatatcggttggcgaacagcgtctttcgattcgggaaatgacgggcgttaaatcggtattgagttggccgcgtggcgattaacgtaaaggcagcaataacgtatcggccccgaactctgcgatatgaaataatcacctagctgaacttataaaggtctagtaagggactgtactttagtctaactggtttctcaccccttgaggcgatacactttcccggtaatgttttgataaaaaatacaaaaaaaaacctgaccgcgtagggccaggttgccaatattggccaacaccagggaaaattttcttgcaccatcttaaagcgattaactccgcagaggcaagcgatctcagctggtttttaggcattaactagctattttgttatgtatgtacgctattttctggtgatttaagataacgtccatccaacgtgaataacctctatcttttgatagcctcgtttcgatttttatttcccgcctgatattcagcaatgaaaaaatattgttcctggaatgttacgcaacctcattctttattgtctgacacatgggtatgcaattatttgcagcattgtcattgccgctggggattattttatttttgataggggctgagtgagacagtggggatggggcgggttgcgtggcgtactcctgaacgtatctcgctagcgcggtgagcggttctggctagtgggtgtgagtgatgtacggcacatgaatcatcattgctctgtgcgacgaggctggaatcggatggtattgcgtgagtgtggcgcctgatcctggatgctcgttgcaacagcctgtggatgtagcatgttcatcaccaacgtggttgggaagggcgcgcagcggtaaggcggggcggacaaacgtgtgttgcggcggttttttcgacacttaactcattgaacaacggataagtgttgcgtgctggtcgcgggaaggtataattcacccgttttccgcatactacttcagtgccgaagtggcgaaatcggtagacgcagttgattcaaaatcaaccgtagagatacgtgccggttcgagtccggccttcggcaccattaagtaccgcgcgaacaagaagccaccgagaggtggtttttttgtgtctggaattcagtatctgcaaggcttccctcgccttttcactcaacctaagtcaattctgactcaatctgcatcaacttactggtgcggggacaactggaggcatatcccggttcgataatgtttgtaccaacgggggacataagcatggcgttaacagagatcaaagtctgtataaggccatagaaatgtctgaacgtcttgaagttgcagcctggcttcaacagcgtgccacagctattatgcgttatatagtgcagagcggactggttgattataatcctgcgcagaagaggataggggcagttgcttctggaaatagacaatgtcgtccggctttggagctaaagtacatccctgagttattaaagaaaataaatggttatactggtagaccacttaccgctgggctgcgtaactcactctacttatctttattcgttccagtgagctgcgcttggctcgctggtcagggatagattttgaaacgtcaatgtgggtgaccccttctgaacgagagcctatgtctggcgtgagacattctcaccgggatcaaaaattcgtacacctcatctggtgccgctttcataatgccttgaatgtacatatagttgcgagcatcatcgcaaacatatgctcatggattcttcaatgcaatgacctctgacaaaaccctaaagcaagcgatatcaaatattactatctggcgcaaaggcaaacagcgtgcgccacataagccattattgctgctgcacgtcctctcacactatcggcagggtcatgagcgtctgtttaactatagttctgaaatctacgagcctctgatggatcttctggaacgttatggaccgcagcgtcgtgaccagcgcccggacatgccattctggcgtctgaagggcgatggcttctgggaactacaaaacgcggaactgtgctcaaccaatggtagtcgccagccgccccgtcgtgaactcatcgaatataatgtcgcgggtggatttgatgccgatagttttgcgttggtggcaaaaaatcacaggttaattgatacgctggcgcagcagctcctggaggcgcatttcccggccagtattcaggaagacatcgctgatgagatggggtttgatattcgcacctctctccgtcaacgcgatccgaagttccgtcaaatggtgctacgtgcttacaattatcagtgcgcgatctgcggcttcaacatgcgccacgacaatgcgccaattgccctggaagctgctcatatcagatggaagcagaaccatggcccttgtgaagtacctaatggcctggcattgtgcgccatccatcataaagcgtttgatcgtggttcgattggtttggatgaaaatatgcgtgtgatggtttccggcgcggtaaatggtggcggggtggtgcagcggctgttctgggattttgcgggaaaggcgattacgttgccaccgattaaagaaaattatcctggcgagcggtttgtggaatggcataggaaagaggtgttcagaggtgagcattgatctgaggtagggcagttattttgcatgtggtatacaaaccattcagccttgatgatgactaaatggtttgtcggcagcgataattacgatgctttacgttctgcaagttcggagctactggcataagggacttttccagaaggtacaacctttgccgctgcgatcaaatgcacatcctgatcgtcaaagaaaatgtgtggcttaaacgcctttagaacttttgttttctctacaccgcccagaaaaaaagcctcatcgacataaactccccagcttctgagcgttttaatgacgcgcatttccgaagggctgtttctggccgtcactagtgcaatacggacgggagaatactcaacgcgggttggcagtcgttcctgaagcttagctattttttttaacagagtggcatatggcccttcttccataggaatatcctgctgtgcatcctccagagcgtgaaaagcggccattccttgagtcttataaaccagttcactttgatctgaaaaaaggactgcatcaccgtcaaaagcaatgcgcacttgcccctccgggatatcggaggcgtcggaaggcggatctttcaggattgcagcagcgcagaatcgggaatcaatcaccttttgcgcatcttcaacgttagttgttaaaaatagatccacatcaaatgcatcaaggtaatcggcaacggtttcgcctgccgtaaaggcagaacgcgtgatatcgagcctgtcatggcggatagtattcaaaacgcggatacccgtatcagggctgttacgcgacatcacaacaacctcaaccaacggcgatttatcatccggctggcggtaccggttcagacccagcaacgctttgactaaggggtagcctgttccgggctgtaaaggctggttttcgtgttccagcatgtaggcgcggtacttctcaatggcactatcaggatcggtcgcataggtttcccgaaacatacgatcggattcgctcatgtcgaaaagcgcagttgcgctgatgccaataactaaagtgttacttaaatctaaaggcatggttactttcctaaacaattatcgtgtaagggcagtatatatcctcagcagcaatgatgagcaggtttcttggatgcaaaccgggagaaaagggttacgctgttttactacgaaaaaatcaaccgtggtaatgacatgtgaattgtttgccatatccgtttaattaaagttaatcggctagccttaatgggatggctggttggtaattttttttcaatggtattatcaccaagagcaatacattcactgattttatcggcaagagcgatccacgaattctttcaataagttgataattaataagattactgagctctacgctcaattagtcatggatgctattgtataaacggttgagtacaaacactgttgccgctagtgtgaatccctacagtagatccagatgtatcatctaacgtaaactccaagggtacaggagaaagtacccctttttctttattcatttcaacaccaagattgaccttgcaattgaaagtttgtcactattctatttaagtatcatgctttatttccttcaatcttttgatataattgaacgttgaaaaaaacactttccgacataagatggcacatcttattaatgtacgcacaataaagccaagtgtttttaaaaggataaatttaactctatgtttttcagttatgagacgattctctacatttcctatttttgtcattacattggcaattttcccaccaataaagaaagacatggcaataaaccacatccatctataatggggggcatttttacttaaggataaacgagcttgttcttttaataaaacttggcggtatcttaataatgatgtagttacacactcattggcgacagcgaaacgatctgacatacctgttttatattttccctcttgaatggcattgcagtaagctgggggtggggtctggcaccatcgagaaggtgatggcaattgtgttattgttttggaaagagatttatttgggcataattttttattgaagtcttgaaattcctgtctgattttatccggagatacttgattgctatagtactcaggaattttatagaaggtgtcaagattttcaggtattacatattcaataatagatgattttgtactggcaatattctctagcgtttcttgaatgtacgatgcccactgacaagatgacatttcagaaagcccgttattgtcacacatgcggctgtagtctttcagctgaacaagaaggtatttggctgcatcattaatatccgtaattgtttcctcatatgctgttttaccgacagctacctctctgtctgatacccagaaaataccgttgccaactgctgttaagatgaggaaaatatctgtccactgtctgaatttctctcctgtagcaaaaatatcactaataattactgccaaaatccaaccacacaatagccctatgaggctaagacttgcgagtccagctgcgttacccgttgcacctgtacctcctatttcataggtcaatggcaaccactggatagcaggaagaaggtgacaaagcgataataggccaggggttataagaagaacaaaacaaatgatgagtcccttttttctggcaagtatccatgagctcaagaaaacaaagggtaataataaaataaatagctcaagaaaacatcctcctaagactacagcaactttattgggagaccagtaactgctcaaaagagcaccctgtgcgttcatttctacaaagttggtactaatcactcccatcccatccagtgtttgcaataaagcgtatccagcgctgtagcaaagcattatgtagggataaaagaataggatcataatttactctcttttcttgcttttcccattatttttatagcatattcaatttgttgtttaatatagctaaaatcgaacattgtcaatttttcgtcctatttagaaccaataacaactaaatctgccatcgttgttttcttgataaataaggccgtactgccaagtagcttaaggccttcttcattaattttgcttactctaagtcctggttgaacaataacaacttggaatttaagaggtgtgattctggagcgctctttcatagcagcaaggtcttttatagtgcctttcagaaagcgagaatgaccacgcgatcgccactgttcctcgcgacgcttaatgtgatggtataaataggaaagattcaggtgtttccaacgaatgcatctctgtgcctgcccacatacttcgtaaagatctttaagtcttgctccagcttcttctgagcctgaatacttgcaatggattaaagagagaacaatacagtcatcaactattctcaaccccactaaatctgctgactcacctttaccatcatcattaataatgacatcgtaattatctttaatttcactgtaccaacgccattggatggataatggattacgagtatagcccattgattccactcgaacatcagttcccttccaatcaaatgctacaatttcgtctttgtcataaaggccaatattttgacttacatggactatatgagcgttgtatgaaaatgagccatcggagtaatgaatcattactggatcaatttccatatactctgatagtgataccggttcagattcaccacgctgtataaaaacttcagggccagatatcaattgataggaataaccttttgctgtagcacttcccgtgagacataatttatattcagatgacgtttcatctgtagaaaaaatgagccgcacattaccatcttcaaactttccagcagtcctaacctctactaaatataaatgagcagatatagtatcaaaatgaaaaataactttatcttcaaacgcagtaagcaaatactcaccccattgagctgatattggatattcattatagggttcaagtaatgggacaggacgcaaaaagttacgcgtaagattgtttggatccggttcagaactaaagatcttgtcccaggctttcttaacccagttgcaccaatcagcaatgctgccacctttttgtggtgaccagactttacctctgcgttgcgagcatccccagattacacggtttcctgattcataacctaatgcagcaatattgcttaagcttgattgagatgcttcaattagtgatagcccctcagtgacatttgggccaaaatattgagtaaagctgattgccccaatttgagatgcgcctaaatttcttgccaaaggatattcaataccattaaatacattaaagactttttcaccactgacaacttcaaatttatcatcacaaatagtactgactagattctcaactcgaaatactttatagtcatttgagaatacaaacaaggcggatctgtcttgatcccaatgagcaattagaattttataattggtatctttaagatctttgtagtttccccaccggactgaagttgcctggacagctagcacaacaagcaaattctcatcttcagctattgcatgccaggattcatcgaatctgggcagtttctccttgtatctttcaggctcccaattgtcacagtacgttttaaataacatgacagaacaacttggctcaatattccagagagaaatctgatcgtgtaaatcacctttcctttttaaggcatccacgacctcttgcaacctaatctctctagcaattcgtccttcagagagtcgccttaatacgttatcccaatcggcatctgttgaatatagatgctgtaattcaccttcaacattagggtccgcaacattcatgactacactggcttgaccaattttctgtgctttattgacacgagtaaatcggccaatgaactgcaaagttactgcaagagacttatgatgatcatgcaaagcggcaattttcaggttgggtagatcatagccttctcccaacatgtctacgcaaataacgattcttgattgtcttgataataatttattaagacgtttttttatttccgttttaggataatcagaatgaacaacgattggattaaagttcggtgcaattttctgataaatagtaagtatttcttctgctcgctgcttactgctagtacgagccatgagcaaatgatcaaggtcattatttaagtctatacgcagttgacctacagctgtatccgcgattgcatgatccataaggtcagagtaatactcctctacaggcagcaaatttacatttgtaaaatagcctgctcgttgggcttcccccattgtatagttatagataatttttccaccaagggactttttatcattcctaaagggagtagctgtaaactgcactacacgtttgtctgtgaatcgttcgcgaattgtctgccatgatgaggctgagatatgatgggcctcatcaacaaaaagatggctacacgactcgcaaagtgcatttaatgctgcttcggagcaggcagacaaaacgctggtcgtagcaaccaagacgtttgattcacaagctaattgcttagcttcttccgctacctgaattcccttcttaataatagcgacattagggagtgtaatgtttggcggaacgactgttagctctggcaaatatcccaactcaatgaattttttggatatttgtgttcggagagagtcagacgggactatgagcaaaattcgctcgcatcgctggtatatcatggtagccagcattgtttccgtttttcccgttccagtgggcagtacgacggtagcaggttctacctgcaaatcagtagcgaaatagcctgcaattgcatgaagtgcacccagttggggttttctgagacctggagaacggtgctctggatcatcctctctaaactgaaattgatgataccattgttcattaatatcctcaggtgaagtgctaaatacctgctctggaaattgctcccagcttaactcagtatcttctcgccatttttcgaatgtaaatggttccttagctttaagggaagctacaccatctgcgcatttccccctggaatttggatctttcagatagatatagtctagagggggctttagacccgtcacaagttcaaaatatccttggaaacgtgcatttctgacttgagccgatactgttgttgatcggcaaagtaatttatgaacataattcccccccacttttcttacaggggcagctttcgcgggcaaggtaaatttaattgttaacaggtcaaataagtccatatgtacttacctcttaagatgtcctgaaaaagcctgctgacttaatttagagaagagggcgtcgctatcaatatcgcctgacgccattttatttaagctattattgattattgatacaatcgaatgaaaattaaccataagttcgtcgggcggaattagaatttcaaaatttttaagttcaacaggagatatatgtggcaccgttgtttctgtcgggtagcaatgcttttcgaaagctggcgatttaatacaactgtaaatatagtttgtgtaagattcgcaacgaggtcgtaacctagctacacgctgaactaagtacgtttctcgctgattttcagggaatatgcatacttttaacccgcttgatatccacggacggtccatagcaaggataatatcactcgccttaattaaataattatctagtttttctagtttattttttggccagaattttgtatcagcccaatctaaataccccgtaagtgtatttgcccctctgcaaagccgtactgattctggtgcatcactaatgtactcattacttttgaatgcaaatccggtaatgacctctgccaattcagtaatgggagctttttttagattttttggattttcaacaggatcgccaaacatattcaaaaacgtagtacgccaaaaatcgttagccagtttcatggcttgctcgcgtttttgacgtataccttcggctttatcaagaatagctgcaatacgtttttgttcattaatagggggaattggtacatttaagcccttaagaaaaggaagtgtaattcctttaactgttgctcctttcccttcactctctattaaactactttgagattccaaccatcgaaaaagatagtctctatcaacaatgtcgttgtctttaataaacaaggctttcaaatcttgatttattgctaaatcaatagtattaattgcaaccttacccaatgccatgcgtgtaggaactattatatttcctgctggaataacgctagttgccgaatttctcacccctaaaagggtgattgaatcaagcgtagagtcaagaatattttttttgaaatccttgactgaagcccatggaatatcaccattccaatattcagaattatttttatcaggggtaccaccacctttaatatcaacaagttcccctaaggaaatcataggccagctcacaacatcccctccagctcatccaaatccgccagaatctctttttccagctcctttaaccgcttcaatatcaccttaggatcttcatactcctccgcctgatacaccacctctttatagcggtttatagagaggtcgtatttctgcgctgcaatatcctctttcggtactacaaacgccgcctgagtgcgatctttaaaatcaacaccagcatcaatccctttcgggtgctgctgttttagcaatgaggctaatttctcacccataaagttatcaacgggtagcccgcgtaaagtacggtaatgcttccagcttgcaagcagatgcggcagatcgttctcttttatcgggttacgcttgtcatccaggctgtagccatcattttgcaggtcatagaaccagacctcgtccgtctgaccgcctttggtaaagatcaggatcgctgttgccacaccagcgtaaggcttaaatacgccggaaggcaggttgatcaccgcttccagttggttatcttcaaccagcgttttacgcagcgactggtgcgctttactggagccaaacagcacgccctgcggtacgatagtggcgctgcgtccacctactttcagcatttgcaggatccgcgcaaggaacagcagttcggtttttttggttttcaccattgccgacagcgtggagtcgatatcttcctcgtccagtgagccggtaaacggcgggttcgccagaatcaggttgaaagcgtttttactggcctgcgggaaattggtgctgaagctttggctcatggtgtcctgataatgaatatccggctcttccacgccgtgcataatcaggttcatggcggcaatacgcagcatggtggtatcaaagtcgtagccgtggaacatgttgttatccacatggtcacgccacggcgtcagcagatcaccagtaaagattttttgctcttccagctcaccgcgttcgttggtgccaatctcggtatgaatagattccagcgagctgtatttttccagcaggtactcatagctggttgccagaaaaccaccggtgccgcaggccggatcgcaaatcgtctcaccacgcgccgggttaggttccatcatctcaaccatcgtgcggataatgtggcgcggtgtgcgaaactgaccgttgatcccggcggtggtcagcttacttaacaggtattcataaagatcgcctttggtgtcgccacgatccagcggcaggtttttgatcacctccacggctttggtcagcagtgacggtttcacaatctccagacgggcatctttcataaagttgcccagcagcgtcaccttcgacgcatcggcctggccgagctgacgaaaatgctggaatacgccgtcgcgcactacttccatcatttcatccgaaccgaggttactgtagtgactgaaacggaactcctgctgttcaggcgcaaaacgcggtttaaaatcaacgcccgcgatttgcttacgcttctcgtcgcgttgttcctgggtatccagcatccgggagtacatcaggtaggtgatctgttcgattacagtcagcgggttagtgatgccgcccacccagaaatcttcccacaggccgtcgattttactttttaagtcaccggtgatcattgttacgtataccctgttataaatacaaaagccccgctgccggggcttgtcatgtgcgtattataccgtcgctgcgtcggtcacaacacccagctcttcgactatcttttgcaaccggacgatctgctctatatccgggaacacaccggtaacgccttcgttgtggatatgcgtaaacggttgttcaaagagctgccgcatttcaatggtgccgtaatcgcggatgtggtttttcagcagtgacaggaagcgcagttgctggctggtcaggctgttgtcagcggcgaactgggcaaagcgcacttccactgcgtcgctgtccatcccgatgatggtacgcaaaagtttatccaggctagctgttgcctgcggatagaactctttcagtgcccggatatcaacgttcggattctggatcagcaccagcttcgccagttcatccagctcggcttgcgtgaccggctcgccgttgcggattttcttcagcaccgggttttgctggaacagcggctccagcgctccctgaacctgctggcgatagagtttgaaatcaatcgagcggatattggttttacgggtttccgtctggatcaggttcgcatcttcggtaatatccacctgtatcgaaccaaatttcggcgtagcatctttctccatcaggtgcatgatgccgcgcaggtgaatgcggatatcttccagttcttccagactggcctgcttccaccagcctaaatcacgaagctgattaatccgctgtccctgctgttgcacctgcgccagatgcggcggcagacgttccactttctcgacgatgaccggccagagcacatccagctcttccgggttggtataacgggcagtttgcgccgccagaatatccatatcgaagcgcatagcatcgctttgcccacgcacgtccagccactgcatcagcggggccaggacagatagcagatcctgctgtgttttaggggaaagctgacgcagcactttttcatcgctgtactgtgctttttgctgccacttttcctgcacagcaatcgacttttcatccagcgcgttgatctgctcgcggagctggtgagcgactaaatccaccgcctgtttatcgaacttacgctgcgcagcagcccccagcataacccacgcttcgaagcgtttttgcgccagcgattttgtcgctgtgacttcggcctcttcggtatgcagctcgtgatactcgaagttgccccagtgatcgaagatgcgaaatttctgtttatccagcggcttgccgttttcatcgttgccgtacagccctgagcaaagacgcgtaccacggccaatcatctgccagaacttcacttttgatttgaccggcttggcaaagaccagattcacaatttccggaacatcaataccggtatcaagcatgtcaacagagatagcgatggtcagctctttgttggtgctctcatccagccctttaaaatcgtcaatcagttgctcggcgcggggatcgtagttgtcgatgacctggcagaagcgtccggcaaactgcgggtacatgtcgttgaacaattcattcaacagcagcgcgtgtttgtggttacgggcaaaaatgatggttttacctggcaactggccgtcccgatctttcaagccattttccatcaggttacgcaggatatagcggttggtgtctttgttgtagatcgcctcatccagcgccttgccatcaaattccagcgtatttggatcgataccctgttcttccagctcgcggatttgttcgtcgcttaatttctcccgtttgatgccttcgcgcaggaattctgtggtgtgcgtgacaacctcatagggaactaagttgttatcggcgatggcatcttccaggctgtagttggcggtagggatacgtccttcacaaccaaatagcccaaaagtggttttgctcaccatatcgatcggcgtggctgtcagaccaatctggagggcatcaaaatacttaaacagatcgccgtagacgttgtagatagagcgatgggattcatcggcgatgatcagatcgaaataaccgacatcgaaatggtccatgattttcatcatgccgggataggtggcgatgtagatcctggcattctgcctgtctgctttcttcgatttcccgaccacatacagcggctcattggtgaactgattgaaggcattcgccgcctgtttacgtagctctttgcggtcacaaagaaacaggacacgttttacccagcgggcatcaatcattagtttgcttagcgcaattgccacgcgggttttgcctgtacctgtcgcctgaacaattaacgattgtcggtacttgttggtaaaccgttcgctgacgcgggcgatggtttcaagctgatacaaacgtccggcaacggccttaccttcgttatccttaacgtgcggcacactgttcagcggcagacgagtttcacgctgctgaataaggtattgcaggctttccttgctgtagaagccaaatacccgacgcggaggataaccatgagttttatggtcgtcccacagccagatatcataaccgttggtgtagaagatgaccgggcgctgaccatattctttttccagccagtcggcatacagtcgggcctgaattcgcccctgctcggcattgacgctggtttttttggcttccaccaccgccagcggtttatgcgcctcatcccacaagacataatccgcataaccgccaccggttgcggtaggctgttctttaacagggtgttcctgcgtaacctgatcggtattttttagctcttcccctacattccagtcagcagcaagcaagcgggagtcaatcaggcggcggcgggtttccgcttcatcaatagagaggatatcggcaacatgctggttacgcgctctggcttcattcaggcgctgggtgagctgttcggccttttcctgctcctgttgtaatgcgcgttgaagcgccagttcacgatcgcggctttcgatttgcgcctgtattgcttcttccaagtgttttttatcggaactcgcagaagatggcgtcagaggaggaagagtaaatttggggcagtcatcaacattaccgtgggcgtagcgaacatacagccaaattcccagtaaatacgcttcctttaacagccagtaagtatctttagctttgatacgtccgccgtgcgcggcgcggttaccgtggatacgcagtgcatccattttcatgatgatggcttccggcatcatgctggtgaagacatcggcgttcattaaatcatacagatttgctttgatgccttcaggcagccgttcctgacgatataaccaacgcaccatcaattcggtgtagttgcgcagcttcaccaaacagctttccggatcggagtgaacatagcgttctgccatatacgcgagttccgccagttccggccactggctgcgcaacatttcaaaattgagagactgctccatcaatcatcgccttatatcgtggatacaacagcatttctggaaaggatatcacattacttttggcagcaaagcgagagggagtcatagctgattcatcctaagataaatcgatgactgctgatcattttattagtctccaaagcaattctttatttgagattggacgcacttattactgatcaaaataatcactatccaactttggcactttaagcaacgttgaactaacacccacctcgttatccatcatcagatgcaccaatcggttaccgtcgataagtaccatgccttctaccgattgcgcgtaggcaacggcatgcttggtaaagccagatgtcgtgatgaatacccctcgtttggccttttgtcccacaagtgcaccgtagaaggcatgtaactcagggcggcctacggtgttttgccagcgtttggcttgcacatacactttttctaagccgagcttgtctaaagaaattacgccatcaatccccgcatcaccgctgcctccgacacgctttaaatcatcgcggtggccgccgtaacctaaacggtgtagcacatccaacacgataacttcgaagcggcctggggatacctggccaaggttctccaggagttccgttgcaaccgcattgcggatctctttgattgattgttccaggcgatcgtctgggctgtttgttaacatcgcttcggtgagaagaggttctgtaaccgggtccaaatccaccgcatcactattttgttgaagtttgacgttggtataagccaaagcgagatgctcgacttctgctgcagtgagcgggtttggatgctgctttaaccaatcgatgcctttggcggttaagcaccatttgcctctggataagctgtgcgagagcccggcacgtttcagacgatcgtgagcccagccggtacggttcttgtaaaccaattggccgctggcaatggtctctgcccgttgttcttcgtttaggttaagtatgtctgctgctgcatcttgcacatcccgagcaactgcgccttcgggcctagttgctaaaaagcgaagcactggctcgatgaattggtcgtaggtaggtactgacatgctgaggttccctgtttttccttattattcctatgatactgcacaaactcggttttgaagttgacaggtagcacgctgttgcaggcaacttttaaccgatagcggcctctttcaactccaacttcaccatcagcttcttgttcacctctttcccatctaccccgctatgaatccgccgatggcaagttgggcagatagcgcccacccactgcgggtgatcggggccttcgtcggctaggcgtttagtgtgatggggttcaaggtagggctcgccgttccttttcttgaatggtgccggctgatcgcaggcttcgcagatgccattggcgcgcttgagcacgtatttttttacgtcttcgctgcgtttgaaccaggattttttgctgtcgctctgttggcgctggcctgatatctctgaagactttatagcctttgcgcgcaactgttctaaactcacctccttctggcctacttctgatgagataatctcatgatcagaatcttgagcagaagatacacggaatagattgaaaattatcccttgtctcatgttttcttgggtatctttacattcagcgtagttccatgaatcacactcaaataacccagcaaatttcacgcccgtacgttttttgttatattcaaataaaagtatatccttaccattctctttatggtcgcggatatctttattgcctttggtaaactgcatgttacctttctggccttctcccgtgtaggagaagtggtcgttgttagaccatccatctttgtacccatgagtttcgccagtctcgccggtgaaaatgaagatcacggggaattctttaggtgtcgatattccgccctgttcttgccctccatagaggtcgtggaggtatttacgtttataaacttcgtctttttccagtatctcaaaaggatgcggtgtttcgacgatcttaaaaccgaggtccttgagaaattgaatggctttttccgtgccgctatcggcattgattcctttaaacggatagccatgctgctcacggtatgctctagcggcaatgcctcggatgtcgtacttctcgccattataatgaagggtgtattttttaaatcgttttatttcatgttgttttaagaattcatctcggccaagttttttatattcttcgatggcttttaaaacggattcttttgaagataacgcctctattgcagttgccaaaactactccctcaccttgccgagttgactctgagcaatgtgcttgctgacgagagcagtatgcatcaatacccagcagttaactcatcgatttaccgaatgcgttaactatgccaggtagggaaggaaatgcctaccttgatgaatgcttttgttgtgatatgtcagtcatatctattggaaaagcgtgattgggaagggcgacgagtacaggcatcgccctgattgccatttacgttagccgcaggcttccatctcccgcagcgcacgcccataaaggttacacaacgcaggaaccagatgcgccgtggcgttgaggtagcgattcatctgctcccagccttcggcatccagctgcgggtgcttttgcagtaaatggccgaacagcatcaggccgtggcacagaccttccgcctgctcggcagagagggcggccaggtctaagagttctgagggattgaaagcgctaagatcgaggtgattaaacagttggcgatagagggtgagagtgtttgcaacggattctgtagtgggaacctttgtcatgggtgcatctccgtatgtcattagttaatgactatcaccagagacgctaaactcgggtggtagcccagacggggttagcgtcaccgggacatacgaaccggcgcttcttgcgaagcccccgcctgagccaccattatttggagtgaactaaagctgctgcattattacataatacagcggtagtatgtcagattcggaacgctaactccggctgcggattttgtcacagcgaaaaaactatagcgttatcagtaaaaggaaaaaataatctgtatagaattacagtttatttacttttaggattggaatgtacctcgcaattcggcatatcatattttcgttgaactatcagtcatccattcatggataatatttcttcattaagatttataaataatggaatatgatgaaagctaattgcgtactggtcattgcaggagcgatattgttaagcgcctgcaccggcgatcgtctcgatcagcgctatgcgccggatatccctatcaccgcccatactaaagcgaatggcgacatctgcatctctccgtcaccaaaggaaaacgaaaggccagatacgctctatctcagtggtgatgctgatgagaaattgattgaggtggggaatcaggatcttaaaaagggcatttgcgttacgcaaaacgattacccgtttcgggaaaatcatatctacagcatgaggctaaattttgtgtcgattgagaagcgcagaaacctgcaggatatttccggcagggcctttattgctcacttcaaagtgaaaaagctcaacggcgcttacgaaattgaaaatatcacgcagggcagcagataacgcagagacaaaatgaaacggatcttcctcctcgcattccccttcctgctcgccggctgtccgtcgataggcgatcgtatccccgtagactaccccgctaccgccaacctgcgtgagggcaaagtatgcatcaccgttcagccgcagggagacgaaaagctcgtgggcatctcaatttaccgattggatgaggcgcagagtcgtacattcaaattcttcgatccactgcgggatgtcgcccccaatcagtgtgtccctgatgagggctacgtatttacgccggggcagcaataccatttctccgcgaagctggtctccctcaagaaacagcagtcgggtgagtttccctctgcgcgtgaattcgtcgccgaattcgttgtgcagcaggaaggcaatcaacttaggttggaagccctccgcatcccacgctaaccccaccgccccaaacctaccccaaatcccccccattgctggcgatcacctttttataccaccagaacgatttcttgcgggtgcgggcgagggtgccgttgccctggtcgtcgcggtcgacgtagacaaagccgtagcgcttgctcatttcgccggtcgaggcggccaccaggtcgatgcagccccaggtggtgtaacccagcaccggcacgccgtcggcgatggcgtcggccatggcgcggatgtgctcgcgcaggtagctgatgcggtagtcgtcctcaatctcgcctgctgcattgaactcgtcgtgcgcgcccaggccgttttccaccaggaacagcggtttttggtagcggtcgtacatcatgttcatggtgatgcgcaaccccagcggatcgatgccccagccccagtcgctgcgcggcaggtgcgggttcgccagcgatttcaccacgttggcggcgctgctgttgttgtcgttcatgtcggcggaggcgcagcgcgaggcgtagtagctgaaggagacgaagtcgacggtgtgcttcaggatgtcggcgtcttccggttccatgacgatgctgacgtctttctcacggaatacgcgggcggcgtaggaggggtaagcgccgcgcgcctgcacgtcgataaagaacaggttctcgcggtctttctccagcgcggcccacacgtcttccggcttgctggaccacgggtagaagttgccgccggccagcatgcagcccacctggttggcggggttcacttcgtgggcgatgcgcgtcgccagcgcgctggccaccagttcgtggtgcgcggcctggtatttcacctgttcgggattttcgcccgcttcaaacaccagcccggcgccggagaacgggctgtgcagcaggatgttgatctcgttgaaagtcagccagtatttcaccagcccgtcgaaggtttcgaagcaggtgcgggcgtagcgggtaaaaaactccaccatcttgcggttgcgccaggagccgtattcggtcaccaggtgcatcggcacgtcgaaatggcacagggtcaccagcggttcgatgccgtattggcggcactcttcgaacaggctgcggtagaaggcgatgccttcggcgttgggcgtcagctcgtcgccgttggggtagatgcggctccaggcgatggaggtgcggaacacggtaaagcccatctccgccatcagcgcgatgtcgtcgcggtagcggtggtagaaatcgatggcgtcatggctgggataaaattcgtcgtcgcgcaggctaaagcgcttctccagcccgagtttgaccgccatgcggttggcgccgtgcgggagcatatcgacggtggtcagccctttgccgccctcgcgatagccgccttccgcctggttggcggctaaagcgccgccccataaaaatcctttagggaatgttgaatcggacatgcaatcctctggtgtctcaatgcgttgcgccggcggcgttcgccgccggtgcggtttggccgggcgcagtggcgttttccggcagatcctcgaagcccagcatcagcgtgagcgcgaacgacagcaccaccgagagcgccatcaccgccaccacccacacgatgctcattgggttggccggatcgaagaactgcacgctggtgaacagtccgggcgaggccatcgaatggctggccaacccgccgatgccggcgactgcgccgcagacgaagccgctgatcaggctggcgatcagcggccgcttcaggcgcaccgccacgccgtacagcgccggttcggaaatccccgccacgatggcggaggccgcggcggccagcgcggtctggcgcagttcgcggttcttggttttcagcgccaccgccagcgaagcgccgcccagcgacaggttggcgccgatctccgaaggcatcaccatgccctctttgccggtttcggcgatggtctggatgatggtcggggtgaatacccggtgcatgccggtgatcaccagcagcggccaaatcgcccccataatggccacggagagccagcccaggtagccgtgcacggtgtagaccagcgcagagatgccgctgccgatccagatgccgagcggcccgataagcagaatggcgatcggcgcggcgatcagcacgatcagcatcggcttgaggaagttcttggtcaccgccggggtgatgcgatccactccgcgttcgatgtgcgacaggatccaggtcatcaccagcgccgggatcaccgtgtaggtgtatttcaccgccgtcaccgggatgaaggcgaattccaccgcctggccctgcgctgccttggccatcagatcgataaagttgggatgcaccagcaccccggcgatggcgatcgccaatgacatgttggttttgaacttcagcgccgccgaggcggcgaccatcaccggcaggaagaagaacgcgccgtcgccgatcacgttgaggatgacgagggtcgaggagcctttctcgaataccccggccatatccaggatcatcgccagcagcttcaccatcgagccgccgatgatggcggggatcaggggcgacatggtgcccaccagcgcgtcgagaatgccggcgccgatacccttcagggtgagcttgcgcttcaccggagcggcgggggatgctgcgcccggcatgccgagcgccagcaccgcctgataggctttggccacctcgttgccgatgatcacctggcactgctcgccgctgtgcaccacgcccagcacgccgtcgatggccttcagcgccggcgtgtcgatctgcgctttgtctttcaccacgaatctcaggcgggtcatgcagtgggtcacggcctcgatattgcccgcgccgcccagggcggccacgatggcgtgcgagatctctgcgtagttcttcggcatggcgtgtcgtctctcagatagcaattcggatagcccaaaggcgaatatttactgcctgggcgatccgtcgttccatccgtatgaaacgcccataagaaaccggtttcacaaaatcatgtattggtgttttgtggttggcaagaactatggtttttggcgttgcgttttcgtgatctggatcgttaggggtaagcgcataccgatgtgcaggggcgtgaaaacgttccaaacgccgggcgtcttgggtagactgcgctgaacccatggattttggcggcgcacagatggcaacgatactcgaggtggcgaaaaaggccggcgtttcaaaggcgacggtgtcgcgcgttttgtccggcagcggctatgtcagcgaggagaaacgcgcgttggtggataaagccatcgcggaaaccggctatcggcccaacctgctggcgcgcagcctggcgaccaacaccacccaaaccctcggcctggtggtcaccaacaccctctacagcggcaactatttcagcgaactgatggcgcagtcggcgcgcatcatggaggcgaacggccgccaactgatcctggcggacggcaagcacaccgccgaagaggagcgggccgccattcagtttttgctggatctgcgctgcgacggggtgatcatctacccgcgttttctgtcgatcgcggaaatggacgagattgtctcccaacaccgtcagccgattctggtgatcaaccggcggctgcggctgaacgacagctactgtatcttcagcgatcagcacgccgccggcgcggcggcggtggcgcacctgatcgcgcgcgggcatcgcgatatcgcctttatcaccggctcgctcgattcccccaccgggctggagcggctttccggctacaaatccgcgctggcgcagcagggcattgcggttaacgaggcgttgatcgtcgaaggaaaatggaacgcgcaaagcggcgtggcggcggtcgatgcgctgctggccggcgggcagccggtcagcgccatcggcgccggcaacgacgaaatggccatcggcgcgatgaagcggctggcggagcgtggcgtggcggtgccggaggcagtatcggtcatcggcttcgacgacatcccattggcgccttatactgtgccgtcgctgtcgagcatgaagatgccggtcaccgagatgatccaggagaccatcaaccgcctgctgtcgatgctggacggcggcgagctcagcaagcgccccagcttcccggccagcctgatcgagcgcgagtcggtggcggcggggccgtacgagcgggattgaacccggaaatgcgtccggggggttaaggtccaggctggctgcctaagccctcgtcactcggcgcagcgatgtcatcctgccaccatgcttttccgcggcggcgtttcagccgtttccccttaccaccctgagtaataatctgaaagagcgccccaagactgctctttcgagccgctatacgttatgttatcccccgaaagtttggccgttcccacccgcctttagcggttgaaagcatcgcgctttcttctgtctcggcatggcttcctgcgttgcgtcggtgaacggtttcactggccagccttgcggccctgcggatgaatggcctgagcatgtcgccgtccggcggcaatacccgagcgaccaccagagattggcgtctgtgagccaagggcggtagcgtagccatccggcgacaatatccgaacacgacggttgcgtgccgacctaaaaccaacagagctgcgatgcagctctgttggttttaggggcttgctcgcggcggcgtggtgggaatgttgttattcgattaccggcagggtgtttacccaggaaaaagcctttagccgttttatgcgcatgtaaaacaatgtggcgatgaaatgaccacggcgtattttagaggattctatgaaaattatcgttaccggcggtgccgggtttattggctcggccgttgcccgccatattatcaatgataccgctgatcacattttggtgctggatagcctgacctatgccggtaacctcgaatccctggcgccgatcgccgatagcgatcgttactccttcgagcaggtcgatatttgcgaccgtcaggcgttggatcgcgtgttcgccgcctttcagcccgatgcggtgatgcacctggccgccgaaagtcacgtcgatcgttctattgacggccctgccgcctttatcgaaaccaacatcgtcggcacctacaccttactggaggcggctcgccagtattggcacgccttggacgccgagcgcaagcaggcgttccgtttccatcacatctccaccgacgaggtgtacggcgatctgcacggcaccgacgatctgtttaccgaaactacgccttatgcgccaagcagcccgtattccgcctccaaagcggccagcgatcacctggtgcgcgcctggttgcgcacctacggtttaccgaccgttgtcaccaattgttcgaacaactatggcccttaccatttcccggaaaagctgatcccgctgacgatcctgaacgcgctggaaggcaagccgctgccggtatacggcaacggcgcgcaggtgcgcgactggttatatgtagaagatcatgcgcgggcgctgtataaggtggtcaccgaaggcgcggtgggggaaacctataatatcggtggtcacaacgagcgcaaaaatattgaagtggtgcaaaccatttgcgcactgctggatgagctggtgccgcacaaaccgggtgatatcgcgcattatgcggatctcatcacctttgtgaccgatcgcccgggccacgatatgcgctatgcgatcgacgccgccaagatcgatgcggagttggggtggaagccgcaagagacctttgaaagcggcattcgcaaaaccgtggaatggtatctggcgaacgaagcctggtggagccgggtgaaagacggctcctatgccggcgagcgtctgggtttgacccgttaatcgatttttaaggaagaagaatgaaaggcattgttttagcgggcggttccggcacgcgtctctatcccatcacgcgcggcgtttccaagcagttgctgccgatttacgataagccgatggtctattacccgatctcggtgctgatgctggcgggcattcgggatatcctgatcatctccactccggaagatatgccctccttcaagcgcttgctgggtgacggcagccgtttcggcatcaatctgagttatgaaattcagccgagcccggacggcctggcgcaggccttcctcattggcgaagcgttcatcggcggtgacagctgcgcactggtgcttggcgacaacattcacttcggccagggcttcggcaacaagctggagtcggtggtgaagcgcagcgaaggggcgacggttttcggctatcaggtgatggaccctgaacgtttcggcgtggtggagttcgacgataacttccgcgcgttgtcgctggaagaaaaaccggccgtgccgaaatccaactgggcggtcaccgggctttatttctatgaccatcacgtggttgagatggccaagcaggtgaagccgtcggcgcgcggtgagctggaaatcaccacgctcaaccagatgtatctggaacgcggcacgctgaacgtcgagctgctggggcgcggtttcgcctggctggacaccggcacgcacgacagtttgatcgaggcctctcagtttatacacactattgagaagcgtcagggcttcaaggtcgcttgtctggaagagatcgcctaccgaaaaggctggttgacgcgtgagcaactggccaccgaagccaagctgctcggcaaaacgctgtatggccagtatctgtcgcagctgatcgcggaaaaataaccccggcccgccgtgctttgaacacccggagcgtggcggggcactggacgaacctgcatatagagcggatatgagcactgtacatatttgtcctctggataaatttattccttcattcattgaatttgtgaatgagaaattcgatcccgatgaacacacgttttgggtctatggcgataaggtgcgtttcgctttgccgccggcggataacgttcactatctcggggcggatctgtttggtaacgtcaagccgacgttgaagttgatgaaggccattcaacgtcacgatcgggtgattctgcacagcttccacggcatcaagatggcgctgttgctgctgttgaccccttgggtattaaaaaaatgctattggttcatatggggtggtgacctttaccaataccaaatcggcaagcgtaacttcaaatggcgcctgacagagcttctccgccgcccggccattaagcgtatgggcaactttgtcacttacatcaagggcgattacgagttggctaaaaagtggtacggctgcaccggccggtggcatgagtgcctgctgtataccagcaacgtatacaagaaaaacgtcattgatgaacgtgcggcgggcgaggacggtaaaaccaccattctgctgggtaattctgccgatccaactaataatcatttttccgcgtttgatatattggaaacgtacaaaaacgagaatattgagctcgtcgtaccgctttcctatggcaataaacgctatgcggcagaagtggtggccgaaggcacgcggcgctttggcgagaaatttgtaccattaaccgactttatgcctttccaacactacctgacgctgctggggaaagtggatatcgcggtgttcaaccatcatcgccaacaggcgatgggtaacaccatttccctgctggggctgaaaaaaacggtgtttttgaatccaggcaccacgcagtgggacttctttcaagaaaaggatatccaggtattggatgttcaaacgttttcgctacgcagcctgagcgcggcggaaaagcatgacaacgagcaaaaaatcgaagcctatttctccgctgagaaccttaccgcgcagttaaaggccgtctttacttcctgatgccgcacggcacatcgccccggcatgcattcagaatcgacaacaagggataacatgataccgttcaacaaaccaccggtaaccggcaacgaaattcaatatatcaatgcggcgttggagaatgggaaattgtcgggcgacggcccgttcggcaaacagtgccagaaatggtttgaaagcaagctggggtgcaaacacgcgctgttgaccccatcttgcaccgccgcgctggagatcgccgcgctgctggtcgatatccagccgggcgacgaagttatcatgccaagctacaccttcgtcagtaccgccaatgccttcgtgttgcgcggcgcgaaaatcaaattcgtcgatatccaccctgaaaccatgaatatggatgcagcgctggtggctgcggcgatcaccgataaaaccaaagccattgtgcccgtgcattacgccggcgtctcctgcgatatggatgcgatcatgcgcctggccgaccagcataacctgctggtggttgaagacgccgcgcagggcgtcatgagcaaatacaaaggcgatttcgttggcgttaaaggtcacctggcggctttcagcttccatgaaaccaaaaactacaccagcggtggtgaaggcggcgcgttggtgatcaatgacgaacgctttatcaaacgcgccgaaattctgcgtgagaagggtaccgaccgcagccagttcctgcgcggccaggtggacaaatatacctgggtcgatttcggcagcagcttcctgccgggtgaactgcagtcggcttgcctgtgggggcagttggaactggctgatgagattaacgataaccgactggcgacctggcacaagtactatgcgagctttgcgccgctggcggagaaagggctgctgacgttgccgaccatcccggcggactgcgagcataatgcgcatatgttctatgtgaagctgaaggatatcgagcaaagaacgcagttcatcgctcacctgaaggcctgtggcgtgatggcggtattccattatattccgctgcactcggcgccggcgggcaaggtcttcggcaccttcattggcgaagacaactacaccacccgcgaaagcgagagactggttcgcctgccgctgtactacaaaatgaccgatgccgatcagaataaagttattgaaagcgtagtgaggttctttgagtgaacgcccgcaagatcctggcgttcgccatcgggccgatcggtaatgccgcgctggggttgttgaccctgccggtcattacctggctgttttcggcagacgacgtaggccgaatcagcatgctgaatgtggccgtgtctttctgcgtgctgtttttcagtttggggcttgatcaggcttacgttcgggaataccacggtgaaaccgatcgcgggcagctgttgaagaacgtcgctttccccggcttgctgatgatcgtagtcatcagtgcggcgttcctgctgttccccggcagtttgtccgcgttgctgttcgaacagaaagacacggcgataagctggcttatcatgttgattcttttggcgtcgttcatcaaccgtttcttgtccctgatactcaggatgcaggagaaggggatggcgttttcgctcagccaactgatgcccaagctgatgacgctgatcgtcattggcctgtgctatgttctgtttacccagcatacgctgatgcagttggtggtggcgaacgccgtcggttttatcgccgtgtcgctgatgctgatgtggtcttcccgggcggattggatagccgcactgcgcagttcgctggactacggcaaactgaaagcgatgctcaagtttggctatccgctgatcttgggcgggttggcgttttgggggttaaccactgtcgataggatgttcgtgcgagcctattccggctttgaacagctggcgatcttctcggtggcggttagcttcgccggcgtggcgagcatcctgcaaagtgtgttctctaccgtttgggcgccgatggtgtacaagctggcggagtctaacgaaggcggcgaacagcagatggtaaccaaggtcacgcagtgcatgctgattgccgtggtttgcctgttcagcctgggcgggcttttttcttggattacggattatgttttgcccaaagaatacattgacgttaagtatgttcttattgcttgtctgggcgcgccattgctttatacgctttccgagaccacggcggtggggatcggtttaagtcgaaaaacgctctattctatgtttgtttcattagttgctttggtcgtcaatatcacctcaaacgcattgctggtgccacgtttcggcgccggtggcgcggcggtaagcacctgtctggccttctgggcattcctgatcctgagaacggagttctcaattatcagctggaagaccatgccacgttttgaaatgtatttcttcactttcctctgtctggcgggggcgtcggtttcagcgctggcaggcgagaaaatgaaatatgagctgtttgtctattggggtgtcttactggccgtggtgctggtgaggaacctcaggttccttaagtcgttcgccaaacgataacgctttcggtcaggcaacccgttgcgggttgccgccgttttccccatttctacttctcatcatgacagcgcgatctcgctgacgtctcctcttgctcaacgcagccgcccccgaatctcctcctccggcagatccacgccgataaacaccagcgtactcttgcgctcttcctctggcagccattcccgatcccagtcggcgttatacagccgctgtacgccctggaacagcaggcggcgcggctcgtcttcgatagacagaatgcctttgtagcgcagcaggttgtcggcgtattccagcagcaggccttccatcacttcggagatttgcatcagcggcagcggccgttccagcgtcaccacgatcgagcggatgtcgctctgcggctgcgggatgcggtggaacagcggggcgggcggcgtcagattcagcttgtcgttcagcgtaaagccttcgatgtcgaacagcacgctcagatcgatatcgccgtgcgtcacctggtagagcggcgctcgggcgttcatccgctgcagccgttggatcagcgcctcgcagtccggcgccacgtcggttttggtcaacaggatgcggtcggcgtagcccacctgcgcctgggcgatgctgaactggctcagctgctgctcggcgtgcgccgcgtccaccagggtgatgatgccgtccagcaggaagcgctcgcacaggatctcgtgcgagaaaaaggtctgggtaatcgggccgggatcggccatgccggtgcattcgatgatcagccgatcgaacgtcagctggccgctgtcgacgccgtccagcagatccagcagcgcgtccgccaattcgttggacttgctgcagcagatgcagccgttgctcaacgtggtgatgcggctggcgcgatcgccgatcagcgcgtcgtcgatcggcacttcgccgaactcgttctcgatgaccgcgattttatagccgtgttcggcgttcaggatgtggcgcagcagggtggttttgccggcgcccaaaaagccggtcaggatggtgactgcaatgggtttcatacgggtccttgtgactgcgggttaacagcagcgcatgccgcctttgccgtcgccgccgtagcgcgcttgctggcgctcgcggaaaaattctttataggtcatcaccggcttgtccgggtggttgtctttcatgtgctggacgtaggtatcgtagtcaggcacgcccaccaacatgcgcgccgcctgcccgaggtactttcccgcctggccaagatttccgaacatagtttcttactcccaaataccctgcttacccttcgtctttcgaaccgcagcggtgttggctgcactcccgaaccccagtcacttacttgagtaagctcctggggattcgctcacttgccgccttgctgcggcccgaaatcctttgggtaccggttaactttcatgtcggtactgcataactgattttattatgcagggtatccgttaaatcacatcaatgctgggtcgaaactttgacctccccctcagttacgccgtcggcgggcgcggcctgcggcaccggcacgtaaggcgtttcctggtcggtgcgtttcggattcttgtgcgccgccatcgcggttttcacgccgtagaagatgatgctgtacaccaccagcaggaacagaatgctcagcccggcgttggtgtagttgttcaccacgatgtggttcatgttggcgatctgctgggcgctcagctcggcgccgccctcggcgatcttgcgtttgtattcgccggccaggaagaagaagccttccagctgcgggttgtcgctgaacagcttcaggcccagcgcgtaggtggtgcagatcagcagccacaccgccggtagtacggtcacccagatgtattgggtgcgcttcattttaatcagcaccacggtgcccagcaccagcgccacggcggccagcatctggttggagatgccgaacagcggccacaggctcttcacgccgccgagcggatccaccacgccctgatacagcaggtagccccacagcccgacgcagccggcggtgccgacaatgccggccaccagcgagtcggttttcttcaggaacggcacgaagttgcccagcagatcctgcagcatgaagcggccggagcgggtgccggcgtccagcgcggtcaggatgaacagcgcctcgaacagaatgccgaagtggtaccagaagcccatgttggcgcccggaatgatctggtggaacacgtgggcgatgcccaccgccagcgttggcgcgccgccggcgcggttcagcaccgaaggttcgccgatgtcggtggcggtctgcaggatctgttccgggctgatgacgaagccccaggaactgaccgccgccgctgcgtgcacggtcacgtccttcagcgaagccatgatcatcggcgcgtcttcggtgcccaggcggtgcaggtccggcatggtgatgcccagcgccgccggcggggtgttcatggcgaagtacaggcccggctcgatgatggacgccgccaccagcgccatgatggcgacgaaggactccatcagcatcgcgccgtagccgataaagcgcgcgtcggtctcattggccagcagcttcggcgtggtgccggaggcgatcagcgcatggaagccggagaccgcgccgcaggcgatggtgatgaacaggaatgggaacagggtgcctttccacaccgggccggtgccgtcgacgaactgggtcaccgccggcattttcagctcagggttgaggatcacgatgccgatcgccagcccgacgatcacgccgattttcaggaaggtggccaggtagtcgcgcggcgccaggatcagccataccggcagcagggcggagacaaaggcgtagccgatcagcgtgaaggtgatggtggtgtctttaaaggtcagcgccgggccccagtacgggtcgtgcgccaccacgccgccgaaccagatggcggccaccagcagcacgatgccgatgactgacacttcacccacgcggccggggcgcaggtagcgcatgtagatgcccataaacagcgcgatcggcacggtggagcagacggtgaacacgccccatgggctttccgccagcgctttcaccacgatcagcgccagcaccgccaggatgatgatcatgatcaggaagcagccgaacagcgcaatggtccctggtatcggccccatctcttttttgatgatctcaccgagcgaggcgccgttgcggcgcgaggagatgaacagcaccataaagtcctgcaccgcccccgccagcaccacgccgcccagcagccacagcgtgccgggcaggtagccgacctgcgcggccagcaccggccccaccagcggcccggcgccggcgatagcggcgaagtggtggccgaacagcacgttcttgttggtcggcacgtagttgaggccgtcgttgttgaccaccgccggggtggcgcggccggcgtccagcttcatcaccctggtggcgatgtacaggctgtagtagcggtaggccaccagatacaccgccaccgaagcgacgacgatccacagcgcgctgatgtgttcgccgcggcgcagcgccaccacgccgaggcaggctgcgccgagtatccccagcagcatccacggaatgtgctttaaaatcccctctcgtttcatgaggtatccttaattccagtctgcaaaatatgaatgaactcatccgcttgtaagagatgtcagagtggcgcggtgagccgtagcgtctttcccgaggtaaggcgggtttaggaacagctcatcatcgctgggggtaaggggggaagacaggcgtatttcgctcagcggtcagatccgccgggtgaacggttggattggcggggtgagcggtttgctgcataaccaacagccgcccgccagccgctgttgccaatgcagcacccgctttaatccgccggctttaaaccctcggtttatcagccagatgccttaacgcggcggttggcacgcattctgctatcggatttataaccaaaacaaggttttcaatatttgtaaatcgataatggttatatgcgtgccgcatcacggcgccaacgagcagagggagagaagcatgtcagcagcaaaccactcgcagcagcctattcagttcgcctactgggtgccgaatgtctccggcggtctggtgatcagcaacatcccgcagcgcaccggttgggacatcggctacaaccgcaagctggcgcagattgccgagcgcgccggtttcgactacgcgctcacccagatccgtttcaccgccggttacggcgccgacaaccagcacgagtcggtgtcgttttcgcaggcgctgctggattccaccgagaagctgaaggtgatcgccgcgctgctgccggggccgtggaaccccacgctggcggccaagcagatcgccaccatcagccatctttccaacgcgcgcatcgcggtcaatatcgtcagcggctggttccgcggcgagttcaaggccatcggcgagccgtggctggatcatgaggagcgctacctgcgctcggaagagtttatccgctgtttgcgcggcatctgggccgagcccagcttcagcttcgccggcgatttttatcgctatcgcgactactcgctgaagcccaagccgctggatccgctgccggagatcttccagggcggcagctcgcgggcggcgcgcgacatggcggcgcgagtctcggactggtacttcaccaacggcaacagcgtggagggcattcgccagcaggtggacgatttgcagaccaaggccagggccaaccagcaccgggtcaaggtgggggtgaacggcttcgtcattgcccgcgataccgagcaggaagcgcaggcggtgctgcaggagattatcgatcacgccaacccggaggcggtgcaaggattcggccatgaggtgaagaacgccggggcggcttcgccggagggcgagggcaactgggccaaatcctcgtttgaggatctggtgcagtacaacgacggctttaaaaccaacctgatcggcacgccgcagcagatcgccgagcgcatcatcgcgctgaaagacgccggggtggatctgatgctgttggcgttcctgcacttccaggaagaggtggcgttcttcggccgcgaggtgatcccgctggtgcgcgaactggagcgccagcgggcggcggcctgagttcagtaaacctgcctgccgttgatgccggtggggaaaatgccggtggcgaaaatatgaccgttggcctggatctggtcgtcgggcagcatctccagcgggaactcgcccgccaggcaactgagaaaggcgttgcgatcgtccgtggtggtaaagccgatcagatcgtagaacagcagcgaagcgatcagctggcgatgttccgggatgcgccgcagcagcgccgccgatggaaacggcaggtggaagaagaacgcgcaggcattcagcagcccctgctccttcaacgcctgggcgcagggcagcagctggtagtcgtcgatacagacgatgtcgcccgggcacaggtgctcgcaggcgatatcggcgaaacggcagttcagctgccggtaggcgcggtagttttccggcgtgaagtgcgccttctccggctggttgtggaacaccggccacaggccgtcgtggtagtagccctgatagtggcggcgaaactcctcgatcgacagcgggaaggtcacctgatcgtaaccggcgcgttggcggcaactgatcgggcgctgcgcgaaattctgcacgtcgccgttccagccgagccacagccccggttcggcgtcggccgccaacgtccggccggcgcaggccagatccttgccgtcgcattgtttgttggaaatcagcaccaaacgagacatcgggttctccttatcagtgcagggcgcgcggggcgtgcgccgcgcagtcggcgcgccagggcgcttgcagcacgggcagcgtgacgcgcaggccgcgcaatgccggatgcgccaggcagcagcgcgtcagccagcttcccagcccgacgccgcggtattcggcgctgacgaacagctcgctcaccgaggcgaaggtggcgtaatcggtcaccatacgggcgaagccgagctggtggcgtttgcggtacaggccaaagcacaggccgtggcgcgccaggcgctccgccgccgcccgatccggcaggctgaggaaacgctggatcgcctcgatatccaatagctgccgatcggtgctgatatgaaaaacgcctttgcgccagcagagcagcggctgtacgggggccaattgcggttgcatgttcatgattatccttaggttaacgaatcagtggatggttacagcatccagccgagttcggcggcggtgacctgttcctcgaagcggcgcagttcggcgcttttgcaggtgtgccacagggtgcagaacgccgggccgagcagctcgcgcagcggatcgctgtggcggaacagcgccagcgcctcctgctggccgagcggcaagggggcggcgttgtcgctttcgcagccgttggcggcgggcggcagcggcagcgggtgttccagcccgtgcagcaggccgccgagcatcaccgccagcgccagataggggttggcgtcggcgccggccaggcggtattcgatgcgctgattggcgctgtcggcgcagggcaggcgcagcgccaccgtgcgattgttgtggccccaggaggcgcgcagcggcacgtgcatgccggggcggaagcggcgaaacgcgttgatgttgggcgccaggatcgccatcgacgccggcatcagcgccagcatgcccgccatcgcctgctgcatgttgtcgctcagttcacccggcgcgccggtcagcaggttctcgccgtgctcgttctgcaggctgatgtgaaaatgcagcccgctgccggcggcatgggcgcagggcttggccataaagcaggcgtgctggtgatgttgctcggcaatctgccgcgtcaggcgcttcagcgccatgatctggtcgcaggcttccagcacgcgccggctgtgatgcaggttcagctcgtactggccggaagcggcttcggccaccacgccggtcagcggcaggctttgcagccgcgcgtgccgttcgatgtcgctcagcagcgcatggtggcgctcgggcgcatccaccgcgaagctctgcgtcgggcaggcttccgcctcggcggggcgctgcggatcctgcaggtagaactccagttcggccgccaccaccgggaagcagttgcgctcgtgcaggcgcttcagcacccgttgcagcaccacgcgcggctccagctcgcaggcgtcgccgtcggcgttttgcatcgtcagcagcagctgggcgtggcgttcgggatcgcgcgcgcaggggcgcagcgtgccgggcaccggcaggcacagccgatccggctcgcccgcccgctgccccagcccgctttcttcaatcacccggccgtgcagatccagggcgtagatcgacagcgggaagtagcagcctttttccaggccaaaggcttcggcgatcggcaggcgcttgccgcgcagctggccgttcagatcgtgcagataaatatccagctgttcggtatccggatagcgctgtaggtagtgttccagctctttgcggaaggtgcgcgtcggcgatgcgggcagctccgccagcagaggattgaacccgatgatattagcatgcatggcgcgctccagaacgaagaccggtcacggccagaggcagggataaacgcatgagacaactctcttgtgaggccatagcggcgatgtgaaaagggtatctgcggcggcaaaaactgtctgtaaaaacgccgtaacgttaacggggtgcggaataaaaatgccgtaaagagcgcggcgggttggccgggtcggcacggtctatactggcgagatgggccgtagaaggagagataacgatgaagagaatagggctgcttatcgccgcgctggccgcgttccacgccaccgcgtcttccccacaggcgtgggccgagagcgaacgggcgatgcgcgccgcctgcctgaaagccagcgggctaaaaaacgccagggtggaaggggagattattcactacggtgatgacgtcggctattcggcgctgtttatcggcgggtgctacccgcagccgtttatgaaaaaccagccgggcagggagctgtgcttatatcagcgcgccacgcagaaggcggcggtgcaggcggtggaggggagcagtgcgtctgctcaaccttgatgattgatgagataaataaaaatacagcctacggtggtaataattgcctctacgagcaaaagtataaagtccatcgccagccacttctgtagttcaggagaggcggttttttgcacgaaatcgtaggttttcgcatcgagccaaacgtgatcccttatttttatttttttcctcttcaggatccaaagaaaccactgtgccttcaatgaggtacctggcatgccgaggctatcggcaaaggcgacgtagggcggaataaaatatccgctgccggcgtaacgctgatagaacgcgtcaaactcttttttatggcgacggtagccaatgaattggatgaaggcgcttaaaaccagcagcgttaagcataatatgacaagggttttcatcgagcagcctgaatcacgatattctcgctatcatcataaagatcaatgtcatgatgaagagcaggccttccagcgccaaaagcgtgccgttgtttttcatccaggtctgcaagcgttcagatgatgaaagacgaacaaattcataggtcttggcgggaagatattggtttttcttcaccttgattttcttgccgcaaaggatccctctgaaccattggactttgatggaagtacctaaagagccaaggccatcggcaattgcgacgtgagcagggacaaagtggcactgttgggtatagcgtcgataaaaaacatcgaactcgcgtttatagcgacgagagtaaatatattgagcaagccaacaaactaagagcagcgcagctgcaataagtgatgctgttttcataagccaccggctaaggttcaaggggcgttatgccttgctcaaaaaagcaaagatacacatcaacgccaaacaccccattttcagcacgcttaagatgaagtcttttcgaatccagctcttcagatgttgagatgtgttttcattcacgaattcgtaggtttttgggctcagaaaagcgtttttccctatctttatttttctgccattcaatacccaacggaaccattgtgctttgatagacacaccgagcaaaccaaggttatccgcgaagatgacgaatggaggcaagggatgggcgctttgcacataacgttgatagaattcagtaaattcgtttctatagcgccgatagtaaagatactgcaccagggcgctaatcaatgtcagagtgaagaacaggacgatagcgattttcattattcaccaaaaatgaaaccagtaatgctgtcggcggctacaccgccaccccaactgccagctgcgccacccagagcagcgcctgctataccacaagctaaaataccggtaccaaacgtggaggcgcctaagacgatactgcaagccgtcattgctagcattgcaccgccttcaccccccaaaatccccgccgcagtacttgccgcaaaatgactgtatcccttcaccgcgatcttggcgcactcctgttcgcgaccggtggtgcaggcgttgtagacgtcgttggtggtattcagcccactcaatccgatgccgatccagccgccggctttcataaacttggccgcccggctggcgctgtcgacgtagttcgaataacccttgatggcgccgacgccggcggtgctccattcatgcaccagcgatttactggagagccctagcgcgtgtttgatttgcgcatactctttcatattgagttgagcacgagtaaggcgattcagtaacggttttaatgtaccgaacagccgcgctcgttccacctgaaactgggtgccaatcaacgcgccactcgtgcggaactgattttggtaggttttttcaatctcaaccaggatattcttgatctggctgaagtagcgttctccggcatccgaagccagcccgacgaccgtttccccatagctggtgaaggcggcgatagcggcgtaattgcggtgcaagaaggtggagaaatcgctgtcaccggctttcaccgctttgctggtgcggcttttggcctgcatcagggcggcgatctgcgtagattggttatgattgcgcggatcggcgacgatcagcatttgccccggttgaaccagcggcgtatcggcattgagctgcataaaaaaacgtgccgcttccgatggcttgccaccgaacaggtagttggcgtggaaggcgagcgggcccgtttgttgggcgatgcaatagcccggtgcgatgctgctggacttctgttccatgtcgaaaagcctccttatttttaggaaacttaacattttctacagggtggtaacaggttctggctcacgctctcgatcggagaatcatctgaaaataccggtgccgccttacccgccacttcccgccatctcccgttcgattaccgtcgccagcgcctgcgcggcggaagagagttggtgctgcgccaggcggatcaggcccacgcgccgttcgataatcgggccgatcagcggcacgcagaccgctcccagctcatccatctgttgctcgcacagcgccggcaccgcgctggcgccgaggccgttggccaccatgcgcccgaccgtcaccagctggtggctctcaaacgccacctccagcgttcgcccgctgcgggccagcgcctgctccagcagcagccgcaccgccgatggccgctgcagggtgatgaaatccagcgtcagcagctccttccagctcacctgcgccctgcgtgccagcgccgaatccttcggcaccaccgccagaaagcgatcgcggcacagcggggtgaagtgcagggtgtcgctcggctccggctcgaaggcgatacccatctccacccggccttcgcggatcatttcaaacacctgctcgttgatgacgtcgtgcaccgccacgttgatgccggcgtaacgatcgcgaaacgccttgaggatcggcggcagcgggttgccggcgaacgacggcatggcggcgatcgccaccttgcccatctgcagggtgaagcgctggcgcatcgcctcttccgcgttgtcccaatccgccagcagctggcgcgccatcgggaagaaggtttcgccctccggcgtcagcgtcacccggcgggtggtgcgcagcagcaacggcccccccaacgcgtcttccagcccacggatcgccaggctgagcgccggctgagaaatattcagccgctcgctggcctgggcgaaattcagagtgtgagctaccgctaaaaacgcgcgtaactgtttgatgctcattttcattttggttggcgttaactctttgttaattgtcggttaacgagtaattaataaaaattctaaatgaatgcggcataaaaacaaaattaacaaatcatttttgtgacctgaagatgccctcacgcaagccagggcatttcgccctgcgccgcaacatgcaggggcaacgatatggcagggctcgacaaacgcgtcggcagctaccaggaagcgctggcaggcctgacggacaacatgacggtgctggcgggcggctttggcctgtgcggcatcccggagaatctgatcgaagagatccgccggcgcggcgtgcgcgggttgacggtggtctccaacaactgcggcgtcgacgggttcggcctcgggcggctgctggaaacccatcagatccgcaaggtggtgggatcgtacgtcggcgaaaacgcgctgttcgagcagcaggcgctcagcggcgagctggaggtggatctcacgccgcagggcacgctggcggagaagatccgcgccggcggcgccggcatcccggcgttcttcaccgccaccggttacggcacgccgatcgccgaaggcaaagaggtgcgcgagttcaacggccgcccttacatcatggaaaccgccatcaccggcgatttcgccatcgtgaaaggctggaaggccgatcacttcggcaacgtcatctaccgccatactgcgcagaacttcaatccgctgatggcgaccgccgggcgcatcacggtggtggaagtggaagagatcgtcgcgccgggcgagctggatccggcggcgatccacacccccggcatctacgtcgatcggctgatccagggcaccttcgagaagcgtatcgaacaacgcaccctgcgggcataaggagaattcgcatgcttacccgtgaacaaatggcgcagcgcgtggcgcaagagctgagggacggttactacgtcaacctgggcatcggtattccgacgctggtggccaactatgtgccggcgggcatggacgtgatgctgcagtcggaaaacggcctgctggggatgggcgagttcccgaccgagcagcagctggacgccgacatgatcaacgccggcaagcagacggtcaccgcgcgcctcggcgcgtctattttcgattcggcgcagtcgttcgccatgatccgcggcggccatgtcgatctgaccgtgctgggggcgtttgaagtggacgtcgagggcaacatcgcctcgtggatgatccccggcaagatggtcaagggcatgggcggcgcgatggatctggtggcgggggcggagaacatcatcgtggtgatgacccacgccgcgaagggcggtgagtccaagctgctgccgcgctgcacgctgccgctgaccggcgcccgctgcatccgcaaggtattgaccgatctggcctacctggaaattgaagacggcgccttcgtgctgcgcgaacgcgcgccgggcgtcagcgtggcggagattgtcgccaaaaccgccggccggctgatcgtgccggagcaagtgccggaaatgcgtttctgagacgggaggtgaatgtgcaacaacgtgaagtggtgatcgtggcggcgacgcgcacgccggtcggcagttttcacggcgcgctggcgccgttgacggcggtggaactgggcacggcggcggtgcaggggctgctggcgcaaagcggcgtgccgccgcagcagatcgatgaagtgatcctcggccaggtgctgaccgccggctgcgggcagaatccggcgcgccagaccgcgctcaacgccgggctgcccgttacgacgccggcgctgaccatcaacaaggtgtgcggctccggtttgaaggcggtgcatctggcggtgcaggcgatccgcagcggtgacgccgacgcggtgatcgccggcggtcaggagagcatgagccagtcgccttacctgatggccggcgcgcgcgccggtctgcgcctcggtcacgcgcagatgatggacagcgtgatccacgatggcctgtgggacgcgttcaacgactatcacatgggcatcaccgccgagaacctggcggagaaatacgccatcagcagagaagaacaagacaggttcgcgctgcgctcgcagcagaaggcgctggcggcgcagcaggccgggcgtttcgtgcaggagatcacgccggtgacggtgccgcagcccaagggcgaggcgctgcgggtcgagcgtgaccaacagccgcgcgacaccagcctggaggcgctggcgcggctgcgcccggcgtttcgcaaagagggcacggtgaccgccggcaacgcctcgtcgctcaacgacggcgccgccgtggtgctgctgatgagcgcggaaaaagccgccgcgctgcgtttgccggtgctggcgcgcatcgccggttacgcctcgtcgggcgtcgatccggcgatcatgggcatcggcccggcgccagccgcgcgccgctgcctggaaaaagccggttggcggctggaggaggtcgatctgatcgaagccaacgaagccttcgccgcgcaggcgctggcggtgggtaaagaactgggctgggaggcggagcgggtcaacgtcaacggcggagcgatcgcgctggggcatccgatcggcgcgtccggctgccgcattttggtgtcgctgctgttcgaaatgcagcgccgcgaggtgaacaaggggctggcgatgctgtgcatcggcggtgggcagggggtggcgctggcggtagagcgcccgtaaacaaccgaggagggcaccatgcagtcatctgactatgcggtactgggcgccgggctgatgggggtgggcatcgccacccactttattcgccacggccatgaggtgctgctgtatgaaccggatccgcagcgccgggcggaagcgccggcggtggcgagcggcattctggccgagctgagcgacgtcgggcagtttgatcgcggcgaacgcgacgcggcgctggcgcggctgcgcgtgaccggcgatctgaacgcggtggtgcgtgcccggctgcttattgaggcgatcccggaacggctcgagctgaagcatgcgctgtatgagcagctggaagggctgatcgccgacgacgcggtgatcgccagcaacaccagcggcctgccgccagacgagctggcggcgcgcatgacccatccgcagcgcctgctgatcgcccatttctggcacccgccgcacctgatcccgctggtggagatcgtgcccggcagcgccaccgaaccgcgtcatctggcggcggtgcaggcgctgctcggcgagatggatcttgaggcggtgctgctggagcgcgccgcgccggggtttgtcggtaaccggctgcagtttgcggtgctgcgcgaggcgctgcacatcgtccacagcggcatcgccagcgccgaggtggtggatcaggtgatgcgcgcctcgctggggcggcgctacgccatggtcggcccgctggaggccgccgacatgaccgggctcccgacggtggcggacatcgcccgccacctgttcccggaactggcgaccggtgacgagatgatggcgctggtggaacagcggctgcagcgcggcgataccggccagcgcagcggccggggattttatctttgggatgaagcgcgcagggaacgcatccaacggcgacgggcgcatcagctgcgctttgcgctgaaaccgtaatttcgcacgccgtacctgacaataacaacgatagcgaggtgcctgatgagcgttttgattgccctggcagcactgggattactgatgctggccgcctaccgcggctacagcgtgattttgtttgccccgatcgccgcgctgggcgcggtgctgttgaccgaccccggcgcggtggcgccgaccttcaccgggctgtttatggagaagatggtcggctttgtgaagctctacttcccggtgttcctgctgggggcggtattcggtaagctgattgagctgtccggtttttcccgttcgatcgtcgcggcggcgatccgcattctcggccggcgtcacgccattccggtgatcgtgctggtgtgcgcgctgctgacctacggcggggtgtcgctgtttgtggtggcgttcgcggtttatccgttcgccgccgagctgttccgccagagcggcatccccaagcggctgatcccggccaccgtggcgctcggcgccttctccttcaccatggacgccttgcccggcacgccgcagatccaaaacatcatcccgaccagcttcttcggcaccaatgcctgggccgcgccctggctggggctgatcggctcgctgttcatcatcgcggtcggcctgctgtatcttgaacgccagcggcgcaaggcgcagttgaagggggagggttacggcaccgagctgctgaacgaaccggaaaccccggacgatatcaacctgccgaatccgctgatcgccatcctgccgttgattctggtcggggtattcaaccttgccttcacccattggatcccgcagtggtacggcgccagccacgatctgacgctgccggggctggccaagcccatcaccaccgatgtggcgaagatcaccgccatctgggcggtggaagcggcgctggtgtcgggtattctgctggtggtggcgttcggctttggcaatattcgcggccggctggcggaaggcagcaagacggcggtcggcggcgcaattctggcggcgatgaacaccgcttccgaatacggcttcggcgcggtgatcgccgcgctgccgggctttttggtgctgtcgcaggcgctgtcggcgatccccaatccgctgctgaacgaagcgatcagcgtcaccctgctggccggcatcaccggctcggcctccggcggcatgagcatcgcgctggcggcgatggccgataacttcgtggccgccgcccacgccgcgcatatcccgctggaagtgctgcaccgggtggcctcgatggccagcggcggcatggacaccttgccgcacaacggcgcggtgatcaccctgctggcgatcaccggcctcagccaccggcaggcctatggcggcatcttcgccatcaccctgatcaaaagcgccgcggtgctgttcgtgatcggcgtgttctacctgaccggcattgtttaaaggagcgataccatgagtgtacaaggcaagaccgcgctggtgaccggctcgaccagcggcatcggcctcggaatagcgtccgtgctggccgccgctggcgcgcgcgtgatcctcaacggcttcggcgatgtggaggcggcgaaggcgcaggtcgcccggctgggcgccgcgccggggtatcacggcgccgatctcggcgatgcggcccagatagcggacatgatgcactatgccgagcgtgagttcggcggcgtggacattctggtgaacaacgccggcattcagcacgtggcgccgctggatcagttcccggtggagaaatggaacgccatcctcgccattaacctgtcggcggtgttccacacctgccggttggcgctgccgggtatgcgcgagcgcaactggggacgcatcatcaacgtggcgtcggtgcacgggctggtggcgtcgaaagacaagtcggcctatgtggcggccaagcacggcgtggtggggctgaccaagacgctggcgctggaaaccgcccgcacgcccgtcacctgcaacgccatctgccccggctgggtgctgacgccgctggtgcagcagcagatcgacaaacgcatcgccgccggtaccgatccgcagcgggcgcgcgatgagctgttggcggagaagcagccttcgcaagagttcgtcacgccagagcagctcggtgagctggcgctgttcctatgcagcgatgcggcggcgcaggtgcgtggcgccgcctggaacatggacggcggctggctggcgcagtagtgagattttccccggagcgcgcaatgcgctccgtcgttatttcccgcctttaattaattccatcgcgtgacggtttacctgcggcaataatatttttttgttatttgctatcattattcccagataatcacgaagggttattttgggtgaaacgtgcggattggtttatttcgtgctgcggttattacattgtttttctccgtgttacaggtgaacacgtttttgctgaaattaaatccaacctaaaataatggcaggttatggcgtgaatttttatatcttgcgtgcgctgttcacatcggttaattatttctgcgtggcttaagaccaccgcgtttataacaataattttttcgggcaggggtaataatgagaaaaaatacaacgccaatattcattggcggcgtcttgctgtcggcgatttccgccggcgcgcaggccgagatcaccattctggataaaaacccgcagagcaatgtgttgctggcgccgctcagtttaaaggtgggcggcagcattcgccccgagtggatcttcaataacggcccggagccgggctatgacaaaaacggccacgacggcggcacgcgttttcgcttcagcggcgattatgcgctgacgcaggacacctcgatcatcggctattacgagtggggcgtcgatctggcgcacgcgctcagctgggacgggcactataacgaagacggcaagcgcgactatcagcgccagctgtacgccggcttcaaagacgatcgttacggcaccctgacctatggccatcaatacggcatctattattcggtggtcggcatcaaaagcgacgtctgggataacgatggccatgcgggcggcaccggcatcggtatttccggcgactatgacggcggcaataaaccgaaaaacagcatcaaatacaccaatgatttcgggccggtcacgctgtacgccaactacttattgccggaagacgatctgcacaccgcggataacctgatttaccgccgcaagggcggtggcgggctgggcttcgattataaggtgacgaaagacttcaccttcagcgccgcctacagttataccgatgcgaagatcaaagacaatctgtaccacgaacaggattatcaccagcagttgtccggcaccgcgttaacctggcagccgaacaactggtatatcgtcggcaccgccagctactacaaagattatgtgccgagcacccgacagcgcacgctgtcgcacttcttcgccggtgacggctacgggctggaaggcttcgtcggttacaccttcaatatcgacaagccgttcctcaaatccgtccagccttatgtggcggcggactcgctgcggctgaagggagacgaggcgtatcacgccaaccacgtctatcttggtgcgggcaccaccatcggttacggtctgtcggtgtatgtggagcgcacgctggccaacagtagcgacaacgagccggactccacctggattacggtgttctacgacttctgattttcacctgctccaagccggcgcctgcgccggcttttttacatggtgatcgcaccgcccagggtctctccagaggcgttgcgctccgccaggtagcgcgccggcggtttgcccaccgcctttctgaacatggtgacgaagccgctggcgctctcgtagcccaaatccagcgccaccgtctgtacgctctcgccctgcgtcaagcgctgcagcgccagcattacgtgcagctggcgccgccagtggccgaagctcatgcccatctgctgttgcaaggtgcggctgagggagcgctcgctcatgccgatgcgctgcgcccactggccgagggtggatttgtccgccgggcagctcagcatgccttcggtcaactgccggatgcgcgcgtcgtcggacaccggcagatgcagattctcgatcggcgcggccgccaactgatccagcaataccgccgtcagacgcccctcggcgccctgttcgtcgtaaagcggctcgaaggtgctggcctgcagcagcagctcgcgcagcagcggcgagaccgacagcgtgcagcagctttgcggcaggccggcggcggcatgttgatcgacgaacaggcagtaggcctcggtggagccggcgccctgggcgttgtgcaacacgttgcccggcatccacagcgcgcactgcggcggcaccagccacagcccgttttccacttcgcagcggatcatgccgcgcacggtgtagatcagttgcgccttccggtggcggtgcggctcgacttcccaatcctgctcgagagtcgaaccttgcagggcaaacagcgggcgcggcacctgatcgatatccagacagtggcgggggatctgtactttcatgagaatagttctcaatttggcggaattgaaaagtattatgtcctgattgcgcaatgcggtctagcgccggtgccgataaagtaagcgccagttctaaaccctttcgcgaggaaactgattatgtcattggataccgccgactttccgctggtgtggatgcgccgaaacgggcgcgatacccaggccgagctggccgaattcagcgcgctgctggcgcgcgccgagccttttgttctgctcaccgaccgcagcgtcggcgatgaagaacaagaacatgaccgcgatgctcgcacccaggtggcgctgtggaaacgtgataaccgcgaggcgctgaagcggtgggtgaaaggcatgatcatgctggagccggacgacgccaaacgcgcggcggcggaagcattcgccgaatacggcgccaaattctggggctatccggtactggtggccgccgatgaagccgcagggcgggtattggcgcagacgttattgttaaaataaggggaacaccatgcaccagcaacaggtgattgaacagctgctggcctggatcgagcagagcctggatcagccgctgacgctggacgacatcgccgccaagtccggctactccaaatggcatttgcagcggatgttcaagcagcataccggccatattctcggcacctacgcgcgccgcagaaggctgaccgccgccgcgcgcgaactgcgcctgaccggcaccagcgtggcctgcatcgccgatacttaccagttcgattcacagcagaccttcacccgttgcttccgcaagcagttcggtctgccgccggccagctatcgtcgcagccaggattggtcgagctatgggctgcagccgccgctgcgcctgactgaagcgccgttgccgcaggccgatatcgtgacgctgcccgcgatgcagctggtggggcacactcaacgccgccactgcacgctggggcagctggcggcctccaagtgcgagctgcgccgccacgcctggcggcagttgctgcagccgcaggcgctgccggaggtggtatacggcctcaccagtctggaagttgaccggcgccgccggggcagcccgcgcatggcctacaccgccgctctgccggacgaaggggcgccgggagagcgggtgactatcgagcagggcgagtatgcccgtttcacctaccagggacaggcggaagggttacaaaactttattgtccggctgtatgacaccgccatgccgcagatgaacgccattcgccggccagggcaggatatcgagcgtttctacccggcgcaggagggcagttgcccgctcggcggcgcggcgatccgctgtgaatacctgattccgatacggcgggaggaagcgttggccgccgccagctaggcggcggttctcgcaaaaaatcgccttcgtggcgcgtcaggttacaaaaaattgcgatattacatcggtaatggttcacactttgattgatgtgcacatataatgcgcatccggtcaaatccccctggtttttcaggccgcagcgccgttggctgccggctgaaattcaacggggcaaagtggccgtagaaaccaatacccataatcgccagtggccttgaccaacacgaagatgaaaatgagcattcgcgcgttattaaccctgtttacggcactggttgcattcagccaggctgccttcgccgtcgtttacccgctgccgccaaaagacagccgtttggtgggcgagaatatccaaatcaccgtaccggaagacagcaaactgccgctggagagcttcgccgcccagtatcagatggggctgagcaacatgctggaggccaacccgggcgtggatccgttcctgccgaaggccggcagcaccctgactatcccgcagcagctgatcctgccggacgcgccgcgtgaaggcatcatcatcaacagcgccgaaatgcgtctgtactattacccgaaaggctccaacaccgtggtggtgctgccgatcggcatcggccagctgggtaaagacaccccgctgaactggaccaccaccgtgcagcgcaagaaagacggcccaacctggacgccgaccgccaaaatgcgcgccgaatacgcggctgacggcgagatcctgcctgcggtgttcccggccggcccggataacccgatggggctgtatgcgctgtatgtcggccgtctgtatgccattcacggcaccaacgccaacttcggcatcggcctgcgtgtgagccacggctgcgtgcgtctgcgcgccgacgacatcaagtacctgttccagaacgtgccggtcggcacccgcgtgcagttcatcaacgaaccgatgaaggccaccgtcgaaccggacggctcgcgctacgtggaagtgcacaacccgctgtcggccaacgaagagcagttgcaatccaaggatccggtgccgttgaccatctctgcgccggtcggcaaagtgctgatggacgccggcgtcaaccagagcgaagtggacgcggcgatcaaggcccgttccggcatgccggtgaaagtgaactgattgcccagagcttcagtgaacgcgataaaaaagacgcctgcgggcgtctttttttatgctttcagcttccgctgttggcgcagtgaatttattgcttccctatcatcgtctttaaaacgaaaagcgccgactcatgttggtctttattgactcgttcgagatacatattatcaatcgcgtcggcgatggggcggctggcttcgaacagcgcctgcccagcaggcgtcaggtaaataaatcggcggcgcttatcatgctcgccggcttcccgttttaatagaccttttccttccatgcggcctagcaattcggccagcgcggctttactgctgatcgccgcttccattaattcgatttgttcaatgcccggcgtttctgaaacggtggccagaatggaatattgttgtttgctgagttcaggaagcgatttttgccattgagcactatgatcctgaagcagttcgcgaatgaggtggaaaaaagtattggccagcgttctgttcatacattattccctgaaaggaaaaaagctaacaataatatcaatataacaaaataagccgataagggatacctgcccggaaagttgttcgtttacgaacggttacatattgcccacttgttttatcgctatctcaggactagatttgataaatcgttcgcatacgaaccttgtggggtgttgcatgaaattagtgatcgcgatgacgggcgcgaccggggcgccgctgggtacggcgctgcttcaggcgctaaaagacatggagggcatagagacgcatttgatcttgagtaagtgggccaaaacgaccattgaactcgaaacaaatttcaccgtgcatgacgtgatggcgatggccgacgtgacgcacagttctgccgatcaggccgccacgatctcttcaggttcttttcatacggacggcatgatcattattccctgcagtatgaaaacgttggcgggtattcgagccggttatgcagaagggcttattggcagagcggcggatgtgattatcaaagaagggcggaagttggtgttggttcccagagaaacgccgttgagcactattcacttggaaaatatgctcgcgctctcgaaattgggggtgtcattggttccccccatgcccgcttattataaccaccccactcatattgatgacgttaccgatcatattgtcgcacgcgtgctggatcaatttggtcttgatcatcgccgggcaaagcgctgggcaggactaaaagaaaatagcaaaaaaaccactgacaccgaggaaggttaaatatggcttatgacgatctgcgaagttatttagcggcgctggatgaggccggacaattactcgatattaccgaggaggttcaggcggaaccggatatcgccgcggcagccaacgccacaggcagaatgggtgagggcgcccccgccattgcattcaggaacattaaaggttttgaacacgcgcatgtggtcatgaacaccatcgggtcatggcagaatcacgccatagccctggggctcccgccggccacgccggtgaagcagcaaatcgatgagtatattcgccgctgggatcattttcccgtctctgcggaacgtcgcgataatccgccttgggccgagaacgaggtcaacggtgaggaaattaatttgtttgagatcctgccgctgtttcgcttaaacgacggcgacggtggattctacctggataaggcctgcgtggtttcccgcgatcctgaagatccgacccacttcggcaagcaaaacgtcggcatttatcgcatggaggtgaagggcaagcgtaagctgggcctgcagcccgtgccgatgcacgacatcgcgctgcatctgcataaagcagaagagcgcggcgaggatctgcctatcgccattacgctgggcaatgacccgatcattacgctgatgggggcgacgccgctcaaatacgatcagtcggagtatgaaatggccggcgccctgcgtgaaagcccgtacccgatagcgacggcccccttgaccggctttgatgtgccctggggttccgaagtcatcattgaaggggtgattgaaggccgcaagcgcgagattgaaggtccgttcggcgaatttacggggcactattccggcggccgcaacatgacggtggtgcgcatcgataaggtttcttaccgctcgcggccgattttcgaatccctgtatctgggcatgccctggacagaaatcgactacctgatggggccggccacctgtgtgccgctgtatcagcagttgaaagccgagtttccggaagtgcaggcggttaatgcgatgtatacccacgggttgctcgtcatcatttccaccaaaaagcgttacggcggtttcgcgcgcgcggtggggatgcgggcgatgaccacgccgcatgggctgggctatgtgaaaatggtgatcatggtcgatgaggatgtcgatcccttcaacctgccgcaggttatgtgggcgctgtccgccaaggtcaatccggccggcgatttggtacaattgccgaatatgtcggtgctggagttggatcccggctccagcccggcggggatcacggacaaactcatcattgacgcgaccacgccggtggctccggatacgcgcggccactacagccagccggtcaaggatttacccgaaactgccctgtgggtggataaattaaccgccatgctggctaaccgtcattaaggagttcctatgatttgtcctcgttgtgccgataaacagatagacgtcatggcgcattcaccggtcaagggcgtgtggacggtataccagtgtcaacactgcctttatacctggcgtaataccgaacctgctcgcagaacggaacgggagcattatccgcccgagtttcgcatgactcagcaggatatcgataatgcgccggaagtgccgaccattcctcctcttctgaggaaatgaaaccgcaggcggggaaaagcccgccttttcatggaaataacaatgatgaaaaatgaagacgtcgttctgcttgacgccgcctggcagccctgcgggacgacgcccaaagatcaggtccacacgcggcatacgccgctgcatctggctttttcatgctacctgtttactgtcgagggtgcagtgttggtcacccggcgcgcgttgagcaaaaccgcctggccgggggtctggaccaattctttttgtgggcatcccctgccgcaagaggcgctggcgcaggccgttatacgtcgcgctcaggttgaattgggcacggaagtcgagcagataacgctgctgagcgacgccttcagttatcaggcgaccgacgtgtccggcatcatggagaatgaggtttgcccggtatttgccgcgtattgtaaaggcgctctctgtgctaatccggatgaagtggcggattatgtgtgggtcgatctcaataacttaatggcggcggtaaaattaacgccattcgctttcagcccgtggatggtttctcaattgaataccggtgcgataacatcaggtttgaaaaaatacagggatgccataaccataaagagcgctgcgcgcgacattagggacggtgctgtaataaaataaatagtcaccgtaagggtgactatttattcattcatgtttacaggctgccgccgaccgaggtcgaggtggagccgatagtctcgcggaaatgtttcgcgtagtcggccacttcctgctgcgtatgcgtcaggccataaagacccagccccacaccgcctgcaacgccgccgatgatggtgccgaccaattggccgaccgcaccggcaataaagccgcctgcgcctgcggatttacctgcaatcagcgcgccggtcatggcgccgtccaacagcccatcccaggccgcgttcagatcgccaccgctaacgtactgttcttcatattgactaagtactttcatatacaatccttataaataaaagggtgacttagtgggtttaattaaattctaaaataacaccgtagcgctatttcactttaaaaatataacggctgccatttgattggcaatattccattcaacgaagggtgttatttggttaaatatagtcgcatttatttttggcgagtgttttaaagagggggattgggaattttcttgggaaaaatagcagatatcgctgggaggtgagaagcaaagccgccaccggttggcgcagcttgtcactattttcacatttattgtctcgtcattcgcatggcgttaggcccacattgcaattattccattaaaaactatcgctaattaatgagttatatatccgcatttattgcccgccattgaaaaaattctcgcaaaaaatctccgctgtgaaaataagatcacacaatcgtaacaaaaggtaaacaaagccctcctatattggctgcttcgcttttggagggagtgtcatgcgtaactggaacgaaccgaaaaagaacaaagcgcacatcgaactgatcccgatgatcgacgtgatgatgtttttattggtgtttttcgtcttgatcagcctgaacgtcattccggcgctcgggctgaaaacgcagttgccgtccgccggcagcgcgcaacagctgaaaccgcagaagaaagcgatcatcacgctgggggccgacgaacagctgcagctggatggccagccgatcgcgctcgacgcgttggtcaacacgctgaagcaacagcagcaggccaaccagaccaccaccatcatcgtcaacagcgacaaaggcgtggcggtcgagcggctggtggcggtcatggacaacctgcgccagggcggcttcttctccgtctccatcgcgacacggaagctgtgacatgtatctgctctatcgctcacgtcatcttttcagctggttgccggcgctgattgtcgccggttgcctgctgttcgccagccaacaggcggcgctgaagatccagccgcgctacgacgaaaccgccattgaactggcgctggtggagcctgaaccggcgccggaaccccaaccggaaacgccgccggagcctcagcccgaaccgccgccgcccgagccggagccgctccccgaaccggtggtgccggcgccggaaccgatcgtggaagccaagccggtgccgaagccacagccaaagcccaaacccaaaccggtgaaagagaaagccaaaccggtagagaaacctaaaccgacgccggcgcccgccgcaccgcgcgcgctggtcagcaaaccggcggcgcagcccgcaccggccgcccccgcggcgccgaaggtgaacgcgcaggcgatagaaaacggctacctgctggccttgcgccgtgagctggaacagcgcaagcgctacccgagcgggcggcaggcctcgctcgagcgcccgcagggcaacgtcgaggtgtggctggaggtcgatcgcagcgggcgggtgctctcttccggcatcgccaacaaggccgccagcatgctgctgaatcgcgcggcgatgagcagcctgcaaagcatcagttcagtaaagccgttcccgagcgaggcgttcgccgggcaaacaaccaaaagatttaccgcgacgttcaattatcaggcgccttagcgcaagggttaatcgtttgatttttatgggatgcacacaatgaaatcgtttaatcgttctgggatctatctggcggtgatgtcggcgatgctgccgggcgccgcgctggcggccgacgccaccgatgtcggcaccatcagcgtcaaggggcagtcgctcggcggcggcatgatggtgcaggacgacagcgccaaggcgcgctccaccgtcaccaaagaggcgatggacaaaatgccgtcggcggccaacgccatcgataaactgaaatacacgccgggcctgaacgtcaacagcaacgacgccagcggcctgagcggcgtggactacaccatgcgcggcatgaactcggatcagatcggcctgtcgatggacggcatcccgatcaacgactccggcaactacgcggtctacccgaacctgctgggcgacgcggaaaacctggaggaggtgttcgtcacccagggggcttccgaagcggacggcccgcacatcggctccagcggcggcaacatcggcctggtgacgcgccgcccggcgaaagacttcggcggtttcgtcaagcagacgctgggcagcaacagcctgagcaaaaccttcgcccgcctggagaccggcgagtacaacggcttcagcaactggctctcctattcgcacaccgaggcgaagaaatggcgcggcgaggggcggctgtactccgacaagttcgagatgaattcgctgtatgaagacggcaacggcaacagcagcaatctggtgatgaagtacaaccgccagaacaacaccaactacaacaccctgagcaaggcgcagttccaaaacgacggccgtgacaccgattatgtcacctcgccggagtacaacagcaaagggcagttgaacaagtattacaagattgaacgcaacccgttcgagaactttacgctgtcgttcacccagaaactgcagctgcgcgacaacctgtcgctgaccctgcagccgtattactactggggcaacggcggcagcttcaacggccagacggcgtcggtattgtccagcacgtcggacagagccgggcagtatgacctcagcaacctgcagtccaacacctattaccgcccgtcgtggacccagacctggcgaccgggcatcaccaccaagctgaaatgggacattaacgatcagcacagcctggatatcggctactggtatgaacgcgcgcgccaactgcagactcagccgttcatcagcatcaagggcgacggcaacccgtcacagatttgggggaaacccggcggttccgatcaggtgaaggacgccaacggcaacaccgtgcaggggcgcaaccagtacaccatcaccccggcgcagaaagtgtggctgcaggacacctggttcgccacgccggactggaccttcgtcggcggcctggcctatcagtacgtggagcgtaaaggggacaaccgcggcagcctgtacaacgtgccggagaagcgcaaagccacctatcacgaattcctgccgaacttcagcgccagctataaggtgaaccaggaaaaccaggtgttttacaacctgacgcgcaacatgcgcacgccgcccaactacgtgctgtacaacgtcggcgattcgctcagcaccaagccggagctgagctggaaccacgaactgggctggcgtttccagcaagaggacatgctgctgagcgccacgctgttctacatgcgctacagcgatcgccagatctccaccaccaacgcggccggcgactacgagatgatgaacatcggcaacgtggagaacaaagggctggagctggagtggagcggccaactgccgcataacttcaactactacacctcttatacctatacccaatcgaagcagaagagcgacatcgtcagcaacggcgggcagccgctgccgacctccggcaaagaggtgccgaacgtgccgaaaaacctgctgaacatgacgttgggttatgacgacgggctgtactacggcagcgtcagcggcaagtacgtcagcgcgttctatggcgatctgaccaacgacgagaagatcggcgggcgcacggtgttcgatctggcggcgggggtgcatctgccggtggacaagaaaatcgtcaaaagcgccgcgctgcgttttggcatcagcaacctgtttgacaaggaatacctgacctcggtgcgcaccaccaccttcaacgcggcgccctacggcggcgtgaaggccagcaccccgtattacaacgtcggcgaagaacgcaccttcagcgtctcgctggaagccaccttttaactgaacgccccgctgcctgccgggcggcggggaagaggaaccctgtatggacgccaatctgttgcacgacattattttctacgtgatgtacgccgcgctggcgattgcgctggtgatcatcatcgaacgcacgctgtacttcgcctatacccagcgccaggcgcgccggctggagcaggcgctgacgccggaggtgcgccgcgcggccgatctgccggacgcgctgacccagcgcaacagcctgccgatggcggtgatcgcgccggtgctggcgcagaaacaccgggccggcgatcgcgaggcgatcggcgatctgatcgacgcccagtacctgctgagcaagccgccgatggtgcgcggtctgtggctgctggaaaccgtggtcaccgccgcgccgttgctggggctgctcggcacggtgatggggatcatcgaaaccttcaaggcgctggccgcctcgggggtgtccgagccgagcctggtgtcggccgggatgggcaccgcgctgtacgccactggtctcggcatcgccatcgcgctgctgtgcctggtggccaacaacttcctgcagagccgcatggagcgcatcaacgagctgctgaaggtgctgctgatccgcgccggtcaaccggccagccgcccggagagcggcagcggtgaacaatgggttgacagcggggcgccgcgctatgcctaatggccatccaacacggcggccgctcggccgcctttatacggcattgtggggcggttgtttgttgatgttgagccagagcgctgcggcgcgttttgcgattcccggttatgagctggtgtataccgcaccggtagaaaccgcgctgcaggccgacgacctgcgcaacaccgccgaggtgtggcgcgagatgttcgacgcggcgaaaacccgcatcgatctggggcagttctacgtggcgaatcaggacggctccttgctggacggcgtgctgcagcgcctgaaggcggccggtgagcgtggggtgaaaatccgcttcctgctggaggagaaaggcatccgcaactccaccgccgagacgctggagcagctgaaggcgatccccaatctggagctgcgcatcattccttaccagaagctgagcggcggcatcctgcacgccaagtatctgctggtggacggcgaacaggcgtttgtcggcagccagaacttcgactggcgcgcgctggagcatattcacgaaaccgggctgcgcatcagcgacgccagggtggtggggcaaattcaggcgatcttcgaacaggactggcgggcgcaggcgctgctggcgcaggataagccggtgccggcgctgcccgattcgccgccgaccgcgcccccgcaggacaactatctggtggccagcccgcgcgcctacaatccggcgggcgtgctcgattcgcaggccgagctgccgcgcctgctggccgacgccaaacggcgggggcgggggcaggggatggactacgcgccgctgtcgtttggcccggagcgcagccgccccttctacgcggtgatcgacaatgcgctgcgcagcgcggcggcgcgcggcgtgcagatcgagctgatggtggccaactggaacaccaaaaagccggatatcgcctggctgaagagcctggcgctggtgccgaacgtgcagatcaaggtggtgaccattccgccggccagcagcggcttcatcccgtttgcccgcgtgatccacagcaagctgatgaccatcgatgatgagattgcctgggtgggcaccagcaactggaccggcggctatctggacaactcgcgcaatctggagctggtgctgcacagcgcggcgatgagcgggcggttggaccagctgtatcaacagctgtgggacagcgtctacgccgagccgttgaagctggattacgattacccgacgcccaagccgggcggcggatcctgataagcagggcgcggttaatccccgcgccccgtttttttatcgccgccagccggccttctccagcgccgtcaccagctgctcggcgctcagcccttccgcccgatggccgttgccgctgacgctattggccgccagcagcgcattgacgatcgcctcttccaccgcttccgccgccgccgcgaacagcgccgaaatgtagtcgttgttcaccatgcgcagcggcgtggtgaaatcgcctttattggcgtagtcggcgggcggcaggccgtcgttgccggtggcgaaggcgataaagatatcgccgctcgaatcctcggtgccgccgccggtgcgggcgatgccgatgctggcgcgctgcgccagccgcgcgcactggtgcggcagcagtggcgcgtcggtggccagcgccaccacgatggagcccatgccgggatgcggcaactgcggcgtgaacggcgaggggatatgccccaggtggcggcccaccggataaccgcccaccagcagcgactcgcgcttgccgtggttggcctgcacgatggcgcccaccgtccagccgccctgatcggcgggcaagcggcgcgatgcggtgccgctgccgcccttgaactcatggcagatcatgccgctgccgccgccgaccgcgccttcctgcggcaagccgccacgggctgcctgctgcgcctggcgcacgtgctcggccttgacgtgaaagccgttgatgtcgttgagcagaccatcgaaggtttccatcaccaccggcatattccagtacaccgcgttgtcgctcgcgggcagcgcttcgcgttccagcgcgatcagcgcatcgcgcactacccccacgctgtgggtgttggtgaaggcgatcgggctggtcagcagccccgcttcacgcacccattccaggccggtggcgtcgccgttgccgttcagcacgtgcacgccggcaaagcagggggcgtggcgggcggagccggggcgcggttcgatcaccgtcacgccggtgcgcacgctgcgcccgtccgccaaatcggcatgaaggctggcatggccgacgcgcacgccgggcacgtcggtgatggcgttcagcgggccgggcgtgccctggccgatggtgatgcccagatcctgagcgcgctgcgtcatggttattctccttctattgagggggcggcgaggggcgccgtctggcggccgcgcagatggttcagcgccagcccgaagccgatgatgccggcaatgataataaagtctttcaggctgctggcgatcaaaatcgtccacagcacgtacaggcagcacagcagcgccgccagcaccggcagcggccacagcggcatcaggtacgggtgatggaagtggcggcgacggcggctgatcagcgccgccaccgccatgatgatgtacaccagcagcagcaggatcacggtgaacgaggtcagcgattcgagatcggagcaaaacgccagcagcgccgagggcacgccgaacagcagggtggcgatccagggggtgccgaaacgcgggtggatgattttcagcgcgcggttgaacgccggcagccagaagccgtcgcgcccgctggcgaacatcatgcggctgaactgcgccacgatggcgataatggcgttgaacaccgacagataaatcgcgccgctcaccacccgcgccagcgtcgggccgccgagctgggtgaccacatagccgaccgggtcggcctgtttggccatctccgccagcgacggcgagccgatcagcagggcggtgaacggcaccagctccaccagcaccacgatgaccagcgtcagcatgatcgcgaccgccatcggtttgccctgttcgcgcatgtcttccgccatgtacaccgctgcgccgtagccgttgtaggagaacagagcgaccccgaccatggcgacgatcagcggcagcgacaccggcgccaggctgccttgcgcgtccagcatcaccggcgcggtgaggatctctgcgctttgatgcggatggctgaaaccgagccaggcgatcagcgccagcaccgccacttccaccaccagaaaggcgccggtcagcagggcgttggccttgatgttgaaaatggcgcaggcgccgccgatcagcacggtgatcatgccggcggtggaggcgtcgaatgaggtgcccagcgcggtattcagatagggcacggcgccggtggccagcaccgccggcacgaacagcgcggcgctgagaataaacagataggtctgcaacccgcacagggtgccgaacaggcgtttgatgatgctgtattcgccgccggcgctggggtgcgcggcgccgagctcggcatagcacagcgcgatggtggcggcgacgcaggcggcgatcagaaatgacagaaaggcgccgctgccggcgctggcgatcgccagcggcgcgatgacgaagatcgaactggccggcgtcacgccggacgcggtaatcatcaccacgtcgaggacgctgagattgcctttgaaggtgtgttcaggggcggactcttgcatggttaacgactccattaacgtgtgagtgagtaattgttttgctgcacaggctgtacgcagaaatcaaatggagcgcgcgaaatgccggggagcgttgctccccggaagtttattgttcttatgtgttacccctgccccgacgggaagctgaagctggcgcggcgggcgtcgccggaggccggccagcgctgggtcacggttttgcgtttggtgtagaacctgacggcgtccgggccgtaggcgtgcagatcgccaaacagcgagcgcttccagccgccgaacgagtggtaggccaccggcaccggcagcgccacgttgatccccaccatgccgacctgaatgcggctggagaagtagcgcgccgcttcgccgtcgcgggtgaacaggcaggtgccgttgccgtattcgtgggcgtcgatcaaggccatcgcctcctgcagcgacgccgcgcgtaccacgccgagcaccgggccgaagatctcttcctgatagatgcgcatgccgggcgtcacgcggtcgaacagcgttgggccgaggaaatacccctggctggggcggccgtcggcgccgatcacgcacagttcgcggccgtccaccagcagctcggcgccttcggccacgccctgatcgatatagcctttcaccttctgataatgctgttgagtcaccagcggccccatgtcgttgcggttgtcgctgccggggccgacgcgcatggcggccatctgttgccgcagcccggcgatcagcgcgtcggcggtgccgtcgcccaccgcgaccaccagcggaatggccatgcagcgctggccgcaggagccgaacgccgcgcccatcagcgcgccgaccgcgccggggatatcggcgtccggcagcaccaccgcgtggtttttggcgccgcccagcgcctgcacccgtttgttctggccgcagccggtgtgatagatgtgttccgcgaccggcgtcgaaccgacgaagcttatcgccttcacgcgcccgtcatgcagcagcgtctccaccgcttcgcgatcgccgttgaccacgttgagcacgcccggcggcagcccggcctccgccgccagccgcgcgatatacagcgcggcggagggcacgcgctcggaaggcttcagcacgaaggtattgccgcaggccaccgccatcggccacatccacagcggcaccatcgccgggaagttgaacggcgtgatgcctgccaccaccccgagcggttgaaactcgctccagctgtcgatgcccggacccgcctctttgctgtgttcgcctttcagcagttccggcacatagccggcgtattcgatattctcgatgccgcgctgcagttcgcccagggcgtcgctgagcaccttgccgtgctcggcggtgatcaactggcagacggcgtcggcgtgctgctccagcagatccttgagcttcatcatgatgcgcgcgcgcttcagcggcggggtgtcgcgccaggcgggataggcctgttcggcggcggcgatggcgcgctccaccgtggcgcggtcggccagctgcacctcctgcgcagattggccggtggccgggtcgtaaaccggctggctgcgttcgccgccggtggcgggctcgccgttgatccaatgggtgatggtcatgattctctccttattcggtggcgttgagggcgtcgccgacggcgttgatcagcgcgtcgatttgcgcttcgctgctgatgaacggcggcgccagctgcagggtgtcgccgccgtagcgcacgtaaaatccgctttcccagcagcgcatcgccgcctcgaaggggcgccgcgccggttcgccgggccgcgccgccagcgtgatgccggccgccaggccgatattgcgaatgtcggcgacgtgtttggctccttgcaggctgtgcaccgcgcgctcgaaatagggcgccagcgcctgcacgcgctccaccatctgttcacgctgcaggatgtccagcgtcgccagcgcgaccgcgcagctgaccggatgggcggagtaggtgtagccgtgcgggaattcgagctggtagtccggctcgccgccgttcatgaaggtgcggtagatctccggccgcaccaccaccgcgcccatcggttgcgcgccgttggtcacctgtttggcgatgttcatgatgtccggcgtgacgccgaacgcctcagcgccggtcatcgcgccgcagcggccgaaggcggtgatcacttcgtcgaagatcagcagaatgtcatgctgggtgcagatctcgcgcaggcgctgcagatagccgaccggcggcacgatcaccccggcggagccggagaacggttcgacgatcaccgcggcgatcgtcgaggcgtcgcgcagcgcgatgatgcggctgagctcatccgccagctccaccccctgttgcggcatgccgcgcgaaaaggcgttgccggccagcagggtgtgcggcaggtgatccgcctcggcgccggcgccgaacgccttgcggttgccggcgatgccgccgaccgagatgccgccgaagttaacgccgtggtagcccttttcccggccgataaagcaggttttgcccgcctggcctttggcgcgccagtaagcgcgcgccattttcagcgaggtgtccgccgcttccgagccggagccggtgaaaaatacgtaatccagccccgctggcgtcagcgccttgatctggttggccagctcgaacgacagcgggtggccgaactgaaacgccggcgagtaatccagcgtcgccagctggcgctgggcggcgtcggtgatttcctgccggccgtgccccaatccgcagcaccacaatccggacaggccatcgaaaatctttctgccgtcgtggctggtgtaatacgcccctgcggcctgagtaatgatgcgcggctgcgctttaaaattgcggttgccggtaaaaggcatccaatgggcttctaaccctgcggcatcgagacgattaagcgaataattttcagcggccatgttttcctccgggcaggaaaataagtgcgattaattaaataaaatgagttgttaacgaattgttgtgcgaaattgactatgtaccgcttgttctctactgtgaataatcatatgtcgaaacttacttaaggttttatgcaagtaaaaaagcgcgcgttgctgggacaattgtcggatatggatctgcgtttgctgcgggtattcaaggccgtggtcgactgcggcggcatgagcgccgccgaactggagctgaacatcagcctgtcgaccatcagcaagcacatcaaggatctggagcagcggctgggcctgacgctgtgccagcgcgggcgcgagggctttgcggtcaccgacgaggggctgattatctaccaggaaaccgtcaacctgctggcggccaccgaggccttccgtcgcggagtggacgaggtgcaccagcgcatgggcgggcagctgcacgtggcgatattcgaccatacggtcagcaatccgcaggcgcagatcggccgggccatcgcgttattcagcgagcgcgcgccggaggtttctttgcaaatgtatgtggagccgattaataccattgaacgcggcgttattgacgggcaatttcaggttggggttattcccatgcaccgcagcgcggaaagtttatcttatcattcgttattcagtgagaggatgttcttatattgcggcgcgcagcatgaattattttccggcccccatgaaacattaaattgggatctgctgcacaattatgccttcgccggattaggctatcattcgccgaatatggaactgagcctgcagcaacatttgcatcgcaaggcgacggggtttgcgcaggagtcgatagcgacgttaattctgtccggcaaatacgtcggctttctgccggatcactacgcggcgttttttgtggcgcagaacctgatgcgggcgatcaaaccggcgctgttccgctatcactgcgaatactccagcgtgctgcgccgctcgccggtgccgcagcgggtggtgaagctgttccatgagtgcctgctggcggcccacggaacagcgtgacgcttactgctctttcttcttgccgaagattctgatcagcgcgccgaccaggatgccgaccgcgatgccggcgaagatccagccgatgatgcccatttccttactcctgctagtgcgttggtctgattatacccgtcatacttgaaactgcatctgtgttggctgcgagtgcgtacgccagtcacttacttgagtaagctcctggcgagccgcctcttgccgccgggatgcagctccaactatttagggtagatatcatcattcgacgcgaaacgcctcttcgatcatccgttgccgctgcgccggcgcatagtcgatccaggaattcttgctgttggatttctccagcgccaccgccaattcctggccggaaatcggcaaatcgtcctgccagaatggcgcgatggcgtggcgggtgatgaaatcggtcaggtagctctccgggctgccctgccagtgcgggtacaggcgcgcggccagctcggccatcagcgcgcgctgctgcggctgttcgctgctttccagcagggtgaggaacggcagcagcaggcggccgcagacctggccgtgatggtagtcgcgcagcgcgccgatctcgccggcgatgccgtgaatgacccccagcccggcggcgctcagcgttagccccccgaggtacgaagcctgcataatcgcttcgcgcgccgcgtcgctgcggttgagcgccggccaggcagcgaggaagtggcggatgccgctcagcgacatatcgcgcgtcatggcgccggcggttttcgacagataggcctcgaacaggtgggtgaaggcgtcgatggcgcagtaggccagcaccttgtccggcgcgccggccagcagctgcggatcgagaatggcggtgtgcggcacgaagttattatggcgcagcgaggctttcactttgctgacctgggtatcggtgatcaccgcgttctgcgtcacctcgctgccggtgccggcggtggtgggaatggcgatcagcggcagggtggcgctgctgattttgctgtcgcccaccttttccatatagcgcagcgtcggcagcgggtgctccaccagcgcggagaacgccttggcggcgtccagcacgctgccgccgccgatggccaccacgcgccgcgcctggccgcgccagcgcgccacccaggcgtctatttcctgcggcgacgcctcgtggctgacgatctcagtgccgatgagcagcggcgtcagcgcttcgcgcaggccggcgtacacggggccgttgagaaaagagcggcagctgaacagcagcgtcggctgcggatcggccagcagcagcggcggcagctgctggatgctgccgtggccgaaccaggtctggcggttggcgatgatatggctgacggacatgaggtctccttgacggcgttgcggggcgcgatgccacagcataagccagcgggcgcggagcggccaccgctttccccgccgcggcaacctgtgagttgtttaacatgtaaacgatgtcgttcttgcatttcggcgcgccggatgctttttttaacagtaccggccgtagtacggccaacaccatccgaaatcggtagattgttaatgtattaataatggcgaggcgggtatggatattcaggttgaacgcttgtctgcggtgatcgatgcggtggccagcccgcgtttttatcccagcctgctgaactggctggaagggtttttcgccttcgacaacgccatcgtctatgccttcgaacgcggccggccgccgcgctgcctgatcaaaaccgagcgggaaaacagcgacgcggtcaaccagatctaccagcagggcgcctacctgcaggatccgttttaccgcgcgctgaacgacggcggcgaaggcgaggtgctgacgctgcgccagctggcgccctgtgggttttatcacagcgactattaccgtaacttttatcgcaagaccggctggcacgacgaggccggcgtgctgctgcaattgacgccggagcgcgggctgggggtatttttcggctcggcgcgccgcacggtggcggtgcgttacccgcagcgggcggatctgcgcagcgcgctgacgctggtaaaaagcgtggcgcggctgcacggcgaagtggtggcggcaccggccgaggccgacacggagaaccacgacggcgcgcaggcgcgctatctgttgacgccgcgcgagcgcgagatcgtcgatctgatcctcgccggctgcggttcgcagcagatcgccgaccggctgttcatcagcctcggcacggtaaaaaatcaccgcaagaacatctacggcaagctgaacatcggctcgcaggccgaactgttcagcctgctgctgaccgccccgcagcggcgcagcgcgtgaatgttaattttttgtagcgaatgtccctaaggggacatagcggcacggctgctgcctcccgataatccgatgtcatggcataggcaatcgggagtgcgacagtgaacaacgaaatcgagtccttaacctactacgcggcgaccaaaaaatacgatctgcgcttcccgacgctggaagaggatctggacgtcgacgtggtgatcatcggcggcggcttctccggtatcaacaccgcgctggagctggcggagaagggcatcaccaacatcgccatcctcgaaggccgctatctgggctacggcggcaccgggcgcaacggcggccaggtgatggccggcatcggccacgatctggagaagatcaaacgccacgtcggcccggccgggctggaaaccatcttcaagatcagcaacctcggcgccggcattatccgcgagcgcatcaagaaatatgacatcgacgccgacttctgcttcggctacggctatctcggcagcaacgcgcgtcaggagaagaccctgcgcggctggctgaaggagttcagggcggtggcgccggaagaggagatcgagctttacaccggggcggaggtgaagcaggtggtgggctccgacgcctacacctgcgcgctgaaacacatgggcggcggccacgtgcattcgctcaacctgttgctgggcgaggccaaggcgctgagcggctacggggtgaaaatcttcgagaacagcagcgtgctcaacgtggagtacgggccgcgcatcacggtgcgcaccgccatgggctcggtgcgcgccaacaagatgctgtgggcctgcaacggcttcctcaacggcatggaaccgcagatctaccgcaagactatcaatacctacgccttccagctggccaccgagccgctgtctgacgatctgatccgtcagatcagtccgatccgcggcgcctacagcgacattcgcccggtgatcgactattaccgggtaaccaacgaaaaccggctgctgttcggcagcgccactcgcctgatcgaatatttcccgtcggatctcaaggcctggaaccgcaacctgatgctgaaggtgttcccgtacctgaaagacgtgaagatcgatctggcctggggcggcccgctgtgctgcagcgccaacctgttcccgcagatcggcacgctgccggatcgcgacaacgtgttttacgtgcagggctactccggcttcggcgtgacgccgagccacatcgtgtgcaaggtgctggcggagggcatgagcgaaggatccgatcgctacgatctgatgagctcgatcccgcacgtcaacatcttcggcaaagacaagctgcggcgagtgatgaccaccgccggtaaggtttggcaccagacatccggctactggaaaggccgccgttaaccctcagaggagaatgacatgaaaccgttactgcttaaacaaccgctgccggaactgctggagatcggcagcgtcagcaacctgggcgccacggtgatcgccggcacgccaaacgtcggcgtggccagcatcttcggcgaaccgaccgacaacctgaactgcggcgtgttcagctgcacccgcggcagcttcgtgatggagtacccgttcgccgagcacgccacggtgtgggaaggcagcgccaccctgaccaacgaacgcaccggcgaatcggtgcagtatcaggccggcgattcctggttcgtcgagaagggcaccccggtgcgctgggacatcacctcggatcgcttcgtcaaacactacctcgccatcgtcgagggctgacgccgtcatgcccccctcagcaggctgaatgccgagggggagcaccttaacctaacgcccgcgcaataaagtcggttacccgcttgaggatctgatccttattggtttcgttaaagctctcgtgccgcccgcccgtgttgatcatccgttcgaaatcgtcgccccgcaggcgatcgagcgcggtttgcgtttcgctcatcagtaccagccggtcgtcgtcgccgtggatccacagagtaggcagcgcgccgaaccccggcccggcgttgatggcggcgaggatccgctgcatggcgcgcagagtggggcgtttgaacggcccgtgccacaccagcggatcctcctgataggccgcgccaaccgccggatcgcgcgccagggtggcggtatccagcggcgcgtcggggatcgtcggcaactcggccagatcggaaatcgccgttctgtcgccgagcagcgggccggacagcaccaatgcgcgcacctcctcgccataacgctgcacgtagcgggtggcgatcatgccgcccatcgagtggccgatcaccaccagcggcagcgtcggatactgttggcgaagatgctcgaccacgcgctgaacgtcgtcgaccacggcgtcataatcctcgatcagcacgcgctcgccctgcgacagaccgtggccgagatggtcggggccgaatacccgcgccccctgtgcctgtagcgtgcgcgccacgtattgatagcggccgagatgctcgccgtagccgtgtaccagcagcgccagatagcgcggcttgtcgtttccccagtcgtgcacggcgatgtcgccgtgacggcctttgataaagctgacggtttgttcggacatgttattgttctcatggtggtagggttgcccttcagcgtagcggctggcggcgagcttgtcaggggcgccggatgcggcgcccgcagagaggggattacaggccgaactggcgcgccagttcgtcgagcgcttcgcgctggaagcggttgaacgcgtcgcgcggctgctgttgctggatgaactctagcagcggatcctgcacttccgtgcgcacgccgctcagctgctccatcaccgccagcccgcagaacggcacgtaggattcggcgtagccgccttcatgcaccatcaccagcttgccgccgcacagccggtcggcggcgtcttgcaccagcgcggtcatggcgcggaagctgtcgctgtgcagctgcatgcgcgccagcggatcgagcgcgttggcatcgtagccgcaggcgacgatgatcagctccggctcgaatttttccagcgacgggataatgatgcgccgcatcgcgtgcaggtagccgtcgtcgccggcgccggccagcatcggcacgttgacattgcagcctgccccggcgccttcgccgcgatcctgttcgccggaatagcccgccgggaagcagccgtcctgatgcagcgacagcgtcagcacgtcgccgcgctgccaatagatatgctgggtgccgttgccgtggtgcacgtcccagtcgagcaccgccaccttgcccaggccgtagcgggccttggcgcgctcgatggcgatgggaatattggccaggaagcagaagcccatcgattgatccggcaggcagtggtggcccggcgggcgcgacagcgcataggcgttatccagctcgccctgcagcaccgcctccaccgccgcgcaggccagtccggcggagagtttggcgatttcatagctgcccggccccagctgcgcctcctcccccagcaggccgccgccgctgtcgctcacctgtttgaagcgctgcaggtagtgggcgggatggatgcgcagcaggtcttcttccgtcgccggttcggcgctcagcagggtgagttggcgcgacaggccggacacgtccatcagattcttcatgcgccgcttggtttccggcgattcggcgtggccggcgcccgaaggcggttgcacccagccgccgaccggcagggtggtggcgtgcaggccggtgctgtgccagaaacagcgttcatcaaacaagaaaccggttgttcttttcacctttctcctcctgttatacggcgcggtgcgcgcggtgaagccagcgaaatcaacagcagcgacagcagcgcgcagcccagcgcgccgaacagcaaggcgttgaaaccgccggaatattcgattaaagagccggccagcgtcgggccgatggccataccgccgccgatcaccaagttgatgccgttcatcagcttgccgtcgttatccagcccggcgacccgcgccagaatgaatggcagcacgaaggtccaggtgaatttgaacagcagggccgccagggcgaagcgcagcagcaggggttggcctgtcagcagcgccacgctggccagcagcagggcgtaccccagtacgatcaggcgcccgccgctgaagcgcgcgccgatcagcgccgcggcgccggcgccgacgatgccgagcaaggtggcgacggccagcacctggccgctgtgggccggcgacagcccggcgccggcggcgatgccgccgataaaggtccagaccgcgctcaggctgatgtaaaaggtcagcaccgccagcacggcgcacagcttgcgcgccagcgaggcggcggggccgctgcgggcggcgcgggcggcggtaaaaccgttggggaacgccgggatgagcggcaggcagcacagcatgatggccgccaaaatcaggtagaccgccatcagaccgaagtgcgcgaacagcggcggcagcaccagcagcccgaccgcgcccagcaccagctggccgagcacccagaaggcatacacccggctggggttggcggtgccggcggcgcaggtgatgcacaggatcatcagggtgccgcccgccagcgaggcgataaagcgcagcggcagcagcagggtgaaatcctgcaccagcgccgaagccaggttgccggcgataaacaccagcgccgacagcgtagcgacccgccgccagttgatgcgcccgatccaccaccacgccggcagcgtggccaggctcatggcgccgagttcggtggagaacaggtggccgatctgcgccgggccgagttgccactgagtcgcgagctgggcggccacggcgggggcggtcatcagaatgcccggcgcaatggcggcgaagacgataatggcggtcagcagccgcggcgggcaggggagcgccgcgccgacggcgggcgcggaaaccgaatcactggacataaaccttttccccaagcgttgagtaacgatgaaatatcccgcccggcccgattgcgggcagggggaagccgcgccataaatggcgaatatgttctggcgttattttccggccgccggcagcggcggccgttatcgggcgttaaccgtgagcgagaaaaccgccggcgaccagttcggtgcggttcaccacgtcggttttggcgaaaatattgcgcatatgggttttcaccgtagacagcgaaatgcccagcttcagggcgatgcgcttattgctggcgccttcgcgcaccatgttgacgatctcttgctctttggcggtcagaagctgcgcctcgctgtcgggcagcagatcgcgcgtcgccagctcgatcagcggcagtaccgcgcgcaggcggccgcgctccacttcggtaaacggcgtatcgcggatcagcgacacaccggcaacgatgcgcttacgctggcgaataaaaatctccgtcatgtcgcgcatgtcgttcggcagcataaagtcgtggtaatagcggcggttgccggcgatcgccgccgggctcatgccgaccatggtgatgtcttgccgatggaaattggccggctgcagcgggtcaatttgctggaagtggttcagatactgctgatgcgttttatcgggcatgccgtgcaggatgtagtgatccggccgcaggtcgcgatcgaccagataaaacaccccggcagacaccgggatcaggtgcgtaatggtcgccaaacagctgttgataaaggcatcggatgcggtgctgtgcatgattcgtgttcctccctttatcgttcaatctggagaaggttggcggtcaatatatgaacgatacaagcatagttgtagcaatttggcaacacaataaaaacatattaacaacgtgaggctgattgcaataaaatacataaataacaagatgacactgcgttaatcagggctttttcgttcggatttatcgcgattttcattaataggttaatgaaataattcaccgcttttcccgctgaatttacagcgcttttcaatgcttgcctgggtcaagctttcgccgccctgcgcgtgctacagccgccgctgtcgtcgccgtccctcgttcttaagaacgatagccaggcttttccgccgctttctacactgcgaattgaagatagcgccaggcggcgccaaacgtataagacgaaaaaatgatgacctttctcgggctgaggcgtcgggttgttcagtccgcatgaccatacaggggacggacgatgcagaaaaaaacgttggcggtggcgttgagcggcgccttatcgggcctggctcagggggcggacgccgatcgccccaatgtgctgatcattctggtggacgacatgggctactccgacatcagcccgttcggcggcgagataccgacgcccaacctgcaggcgctggccgaacggggcgtgcgcatgagtcagtactacacctcgccgatgtcggcgccggcgcgttcgatgttgatgaccggcaacaccaatcagcaggccggcatgggcggcatgtggtggtatgagagcaccgccgcgcagccggggtatgaaatgcgcctgaccgaccgcgtgaccacgctgccggagcgttttcgcgacgcgggttacgccaccatgatggcgggcaaatggcacctgggctatgtcgacggcgccaaaccgaccgatcgcggctttgagcgcgccttcgcctttatgggcggcggcaccagccatttcgacgacgcgaaaccgctgggcaccgtggaggcgttccacacgttttacaccctgaacggcaaacgtgtgtcgttgcccaaagatttctattccagcaaggcctatgccgatcagctggaacagtggatccgtgatactccgcagaataagcccgtcttcgcctatctggcgtttaccgcgccgcacgatccgctgcaggcgccggatgactggatcgccaaattcgacggcaaatacgacgccggttaccagcaggcctatcagcggcgcattcagcgcctgaaggcgctgggattgatttccgatcgcacgccgatgccgacgctggcgctggataaggcctggaacgcgctgacgccggaacagcaaaaatatgaagccaagaccatgcaggtgtacgcggcgatgatcgcttatatggacgatcaggtcggcgcggtgctgaataccctcaagcagaccggccgcgaccaaaatacggtgatcgtgttcgccaccgacaacggcgccaacccggccagcggcttctactacggctcgaagccggagtattggcggcagttcgacaacagctacgccaacctcggccgcaagggatcgttcatctcctacgggccgcactgggccaacgtcagcaacgcgccgtacgccaactaccacaaaaccaccagcgcgcagggcggtatcaacaccgatttcatcatctccgcgccggggttgaagggccgcggcggcatcgatcgcacgccgatggcggtgtatgacatcgcgccgacgctgtatgactatgccggcatcgacgcccacaaaccgctgaaggccaaaccgacgctgccgatggtcggcgtcagcttcaagcgctatttcagcggcgaggccgacggcgtgccgcgcgcgacctacggcgtggagctgcataaccaggccgcctacgtggacggcgtctggaagctgcggcggttggtgaaggccgggccgacggcgcagatggcgccgtgggggctgttcaacctgcatgacgatccgctggagacgcgcgatctggccgccgccgacccggagcgggtcaaacggctgagcgaggcgtatcgccgctttgcgcagcagggcatggttattgaagccaaaggtgcagcgatcgactatctcggcgtcgacgccaacaccggcgactacattggcctggatccgcagacccacaaaccgttgccgcaggcggcgccatgaacctggcccagctgcgcacgcagcagatcccggtagagagcgaaccgcgcgcggcggcgccttttcacctgctggtgaaaccgatcggtgctggctgcaacctgggctgccgctactgctactacccgcagcgccagcaagcgcagacgcgcaagatggacgacgacctgctggcggagtttatccgcggctacatcgccgcccagccgcgctacagccgcgagatcaacttcgtctggcagggtggagagccgctgttggcggggatcggtttttacaagcgggcgctggcgttgcaacgccgctttgcgccgccgggcgtgcggatcagcaacagcctgcagaccaacggcaccctgctgaacgatgcctggtgccggctgttccggcagcatcaattcatcatcggcgtcagcctggacggcgatcgcgaggtgcaggacgcccatcggccggacaagcgcggcggcgccagctatgacgccgcgctgcgcggcatcgcgctgctgcagcgccatcagatcgacttcaacctgctgatggtggtgcacgacggcgtcgcggaccgcgccgaggcgatctacgatcatgcggtggcgatcggcgcgcgctatctgcagtttcagccgctgatgctggaaggggatgcgcccaccgccggctatgggctgagtgccgccaactgggggcgcttcatgctggcggtataccgccgctggcgcagccgcgggcacgtcggccaggtcttcgtgatgaacattgagcaggtctacgcgcagtatttcacccacgtcagccccagctgcgtgcacgccgaacgctgcggcggcaatctggtgatggagccggacggtcgcctctacgcctgcgatcatcttatcaacgcgcagcacctgctcggccatgccgatcggcagacgccgctcgccaccctggcggcaagggcggcggagatgccgttcggcaagaacaaaagcctgcgccgcgagtgccaacgctgcagcgtgaaaagtgtctgccagggcggctgcccggcgcatgtgggtgaagatcgctacaaccggttgtgcgccggctattacgccttcttttccgcgctgctggcgccgctgcgcgcctacccgcgcagcccgcagggagcgatgcagtggcgcgccgccgtgagcgcggccgcaggttgaaagcgtctcgtccttaaggacgatagtcagcattttcctttcctctctatagtgagatgaccgccgctggcggtgaaaaacctgcaagcacctgcatgcatcaggccaaaactataagaggaaataaccatgaacctgtcgtcgcggttgcacgcccacctggctcgaggcaaggtcggctttcccaccaccctggccagttcggtcggggtgatcatggccagcccggtgatcctgacggtcaccagcggcttcggcatcggcggcgacaccttcgcgctggcgatgctgatcgccttcatcatgatgcaggcgcagctcaccactttctccgaagcggcggcgctgctgccgacttccggttcggtttacgactacatctcctgcggcatggggcgctttttcgccatcaccggcgcgctgtcggcctacctgatcgtgcacatcttcgccggcaccgccgagaccattctctccggcatcatggcgctggtgaacttcgagcacctcaacaccctgatggaaagccacaacgcctcctggatggtcggcgtcgggctggtcgtcgtgttcggcctgctcaatgcgttcggcatcgaggccttcggcaaggcggagatcgtgctgaccttcgccatgtggagcacgctggtgattttcggcatcgtcgggctgctgtcgccgcatgcggtgccgctcgagggctggttcggcagcacgctcgatctgaacgatcccttcgcggtgttcagcctgatcggcatggcgatgttcatgttcgtcggctgtgagctggtgacgccgatggcgccggagatcaaacgctgcgatcgggtgatcccgcgggcgatggcgctcgggctgtgcggcgtggcggtgtgcatggcgctgtacggcgcggcgctcagccaccaggtggaaaacgtggtgatcgacgccgccagcggcacgcgtctgctggaaacgccgatggccatcccggcgttcgccggccaggtgatgggccagttcggcaaatactggctgggcgtcggcctgctgctggcgggcgcagcgaccatcaacacgctgatggcggcggtgccgcgcattctgtacggcatggcgctggatggcgcgctgccgcgcatgttcgcctatctgcacccgcgctttaagacgccggtggtcggcattctggtggcggtcctgatcccctgcgtacatgccttcgccattcagggcaacctcgacaggatcattccgctggtgctggcggcggtgtgcgcctggggcgtggcctacctgctggtgacctgctcggtggtgatcctgcgcctgcgccgccccgatctgccgcgcgcctataaatcgccgtggttcccgctgccgcagatcgtctccagcgtcggcatcgtgctggccatcgtctacatcacgccgccggggatgaacccgcgcgacgtctatattcccttcggctggatgatcggcctgaccgccgcctatgcgctgttctggacgctgtgcgtgcagaaagtgaatccgttcaagccggtgccggtcgagcaggtgctggagaacgcgttcgccaagggcgaaaacgaggaggcgcagtttgatcggcttacttccctcacttaatcgcgcctggcggcgagcgccgtcgggctatcggccgggcgccgcgctggatcgtctggcgcgtaacctggaaccctacgcgtgcgaacgcctggcgccgggcctgctgcggctgacgctgccgcaggggccgcagatcgaggtcagcgaacaggtgcaggggctgtttatggcgcatatcgtcagccaccgttttcggctgcagggagtatgcgcagcgcagcccccgctgacgctggatgtggtgaccggcggctggctgcggcggcgcggggtgcgttatctgttgcgccagcgccatgcggccgcgcagcgggtgctggaaggcctgcagcgctacccgcagatcggcgagacgctggcgcagctggattttcgccgcgtgcggctgacggtgaacgacgggcgctggcaggtggatatcgagcatttcgccgcatcggaggtggtcagccgtttgccggccggccgccgctatctgcggctggatgctgaacagcggcggctgccgttgagcagcctgctgatgatcggccaactgatggagaagctgaatcatgaatagagtggttgtgattaccggcggcggcaccggcgtcggcgccgcctgcgcccgtctgctggcggcgcagggcgatcgggtgttcatcatcggccgccgcccggaaccgctggcggcgctggcgcatgagatcggcgcgcaggcgctggtgggtgacgccgccagcggcgagagctgggcccacacgttgctgccggccattctgcgcgacgccgggcgcatcgactgcctgattggcagcgccggtggcatgggcttcaagcgtattaccgagatgaccgacgcgcagtggcaaggggcgatggacagcaacctcaacagcgctttcgccagcgcgcgcgcctgcctgccggaactgatcaagagcggcggcaacctgctgttcgtcgcctcgatcgcctcgctggccgccgggccggaggtctgcggttatgtcaccgccaagcacgcgctgatcgggttgatgcgctccatcgcccgtgactatggcccgctgggcgtgcgcgccaacgcggtgtgccccggctgggtgaccacgccgatggcggacgaagagatgcagctgctgatggacgcccatcagatctcgctggagcaggcctaccagatggtctgccgtgacgtgccgctgcgccggccggccagcgccgaggagatcgcccgcgtctgccgtttcctctgttccagcgaggcttcaatcattaccggcgcggcgctggtggccgacggcggctccaccatcgtcgatgtgccgacattggctttcacttccctgtaaggagcatttccatgagttcagaagcggtattcattcaggttggcgcgctggcggaaggctttgcgccgcacagcaatacgctggaacgccagcacggcctggcgggcaccacgctgacgctgcgtttcagcgacggcgcgacgcagcgctgtcggtttaccgacgagcagacgctggagtggggagagcggcgcggcgtcgcctatcgcgccaccagcattcgccccggcgtgctgttcatcgattttctcgatcccgcccgcgccaacgccagcattacgctggtatgcgaccgcaatcagggcaactttaccgcggtatacggccagctgccggacgaagcgcaggcgcggctcgacgccttcagccgggtggaacaggggctgccgctgaccgcggtcgaggccgaattccgcttcggcacgctggatgacgccgacgtggcgccgccgggttttaccgatgagctgatcggcatgcgcaacatgtacacctacagcccgaccgaacgttacgagcacatctacctgaacgacaacttctatgcctggcagtgtctggacggggtggagaaagggctggcggacgtcgaccgctgccactacgtgaaggtggcggagcagctttatctgtttgtctggcgcgagaagatcattccgacgctgggcgtggtgatgatcgatctgcagggcatgcgcaccgacggcaagatcctcggttatcagggcagcgatttcagcgcgctgagcaactttgcggtgggcgcccacgcgcaggtgctcaacaccacgcgccacccgcgaggataggccgatgagcgcaacctatgcggccgacgccttcgccgggcaggcggtgctggtgaccggcggcgcgcagggcatcgggctggcgatcgtcagcgcctttgcccggctgggcgccgaggtgacgatcgcggacgtgcagctgccgcaggcgcaggcggcggcgcaaatgctgcgggacgaagggctgagcgtgcaggcgctggcctgcgatctggccgagccggggcagatcgccgagctggtggcggcggtgggcgagcggcatcaacggctggacgtggtgatccacaacgcagcttactttccgctgacgccgttcgccgccatcgacgcggccctgctgcaacgcacgctgagcgttaatctgatggcgccgttctttctggcgcaggcggcgctgccgtggatgcgccgcgccggcggcggcagcctgctggtgacctcgtcggtgaccggcccgcgggtggcgtatccggggctggcgcattacgccgcctccaaggccggggtaaacggctttattcgcgcggcggcgctggagctggcggcggagaacattcgcgtcaacggcgtggagccggggatgatccgcacgccggcgatggccaacctgggcgacgcgcaggtgaatcaggcgatcgccgccgcggtgccgctcgggcggctgggggaaccggaagacatcgccgcggcgatggtgtttctcgcctcgccggcggcggcctacatcaccggccagacgctggtggtggacggcggcgcgctgttgccggaaacgaatgctcaccgctgattttgatctcatcagcgggagttttaccgcatgcgcgattgattgattgatagacagttgtttgctcaagctggaggtttgggcagaagcgcttaccggctccgcgggacgtttccttaaccaagtgccccattaagatgcaaccggttattgatgtatatagccggttgcgtatgaagcagatgtcagcctttactcttctcggcacaggtaggttggatacttcctgtcctgaatcaaccacaccgacggagccacctcagaaatagtcagatagtaacgagttccacgccgggcaaaatcgccccacacgttgtctggcgtattatcgttatgtcgccgtagcgtcttcgtgtaggtcagctcgatgattcccgcatcattgcgcggcctccaggtaaaattcacatcgcgatccaccatcgtcgccagctctcgggtagaggctgcccctttgtaggtggtgattccggttccgtcgcgatgaaagtaaaactgggtcatcacattcacttttacctcactgactttgcctgcatttcgggtaaaaataaacttagtggtacatgcaagcatatcttgcttctcagtcctggtatgggaaaggaaagttgccagtaatcccaccgtcacaacgccactgacgattaacagagctttaatcctcacttttcaaccccacttttataacgaattgttttacataggccctttttactttttgggcaggagccaataaaaatctcatctgcagaggtgagagggaagcgggcgctaaaataatagatgtcatacttgtcgcgctggcagtccaggttattctcactaagcagggaaggaagcttggataaaataatcggtttttcaggggtgcttatccaccagacagtacactgctcaaaattttcattcggtagcctcatgattcgcggaatattcatcgcatactctgaaagtaagtagctccctccgattaacgttgatacggctaatgccgcaatacagtaaggccggtgtgttgataaacgtaatctctctttccatgttttttttgttttcgttttcggtggaggaactggctcgatagcgacatttttatcgagatgcttctgtgctacgacatccgcatcaaaataaaaacccttgcctggtactgtcactattggcgatgtgtgaacgcccaacgactggaaggcttttcgaatctcgctgacagctttgttgaggttgttaccggatggcgtatagccaaaatcttgccacacccgggtaatcagcatgtctctgctgagctctttttctctatttctaatgaactccaataataatcgaacagcaggcgctgataactttaccgctgattcaggctggcctgccaggctgagtttttgtgtgtttgggtcaaatactaacgaattgcttaacataaagaacatataaaaacctctttttgggtttgtgatttttatttataccttatccggcagggtgggttctctatcgcccctttttgggttgttttttaatcagatcgatagtttaactaaatcatcataatcagtgtttttctttaactatttcgtataaatagtcagtaaatagagaaaaaaactgtgttttccaaatttcgcgatacaagtggtgatggtcatcctgcttagtataagatttttctcaaggtgtgaggacatgaaaagtgtgtctgaatgagaagaagaacattacgcatcattatgatgagcacaagaaggtgagatttgaaagataataaaacgctacccgggataagtagggttttggcccttttactattattctccttatttagcaacgttgctctggctaatatgagtgtttatccgatggagctgggtgtcgatgcttcagggaccgcgatcattaaagtggcatccaaaagtgatgatattcagttcgttcgggtgacgcaaaagagaattcttaacccaggtacgccgcatgaaaaagaggtggaaatcgcttcatggaaaaaggacggtctgatagtaacacctgccaaatttgcgcttgctgctggctcaatgcgcgttgtgcgcctggtatccctatcacctccgacaacggaaagtacatggcgggtttattttgaaggggtgaaacagcctgatgttttattgtccggagaaaataaaacccgctcagcagaagcgaagctaggggtgaatgttatctggggggctttggtgcatattgctccagagcggcctaaggtttcgctggaaattaatcctgcactcggagaagttataaatacaggaaacgtacgagttccgctaaaagaaattggtttttgccgtgccaatgcatcgtgcaaatggattaaagaagacgctactgtgtatccggggacgcaaagaaaattaaagtccctgagtgcaaatagtggtgcaacctacaagtttcgctactttaactggctgagtaaaaccagtgaagaggctgaattacccgtcgcaaaataacgtgacaaccgtaataaccacgcctgtggtttatttatagggcgaatgaagcccgcatgccaatatggagataacaatgcgtcattatattaaacctctgctgattgctaccgcgctggccacttctttcagctcgcttgccattcaaaaagatatcacagtcaatgcgagcgtcgattcccagctggatatgacccaggcggacaataccccgctgccggccagcatcgatatgcagtacctgccgggtcggggtctggaaagctatcgtttgaacacgaaagtatggtctaactccgccaccagtaacgtcaaagtccgtctggtcagcgccgcacagttaaccaatgcggatggcgatcagaatatacccctgacggtacaactgggtgaaaaggcgctcacgaccaccgacgccgaattcaccggtgccgagctgttccctgggacagtggaaaatggttctgcggtactgccgctcatcatttctcagaccaccaaaggtattttgaaaacgggccaatacagcggtgtagtcagcttgatgttgacccaggcgactaccgcggaaggcggtgcataaacaaggtagtgcgtttgtaagtcattaacatcagagggtctccaccctctgatgtcttcctgacatcagaggtttttttcatgtctctcccccgtaatattctcctttttgccgcattgttacctgcatccattcagcaagcctgcgcggagatggctattccggagggttttgaggagctggcgaaaaaccagcgcttatggattgaagtgacgctgtacggtgattctcttggcctgttcgaaacggacatgaatctggagaccgtgcgtttcatacagccggagagtctgctagacgctatcaaaaaacggtttaatgatgatcctcgcctgctatcagccatcaatgcggtgctggcggctccgatgcctcgcaacggcaatctggcctgtagcagcaacggcgaggcgcgtggctgtgggtatatcgagaccagcagtgcagcggtgatttacgatgaaaacaacgcgcgtatcagcttgtttctcgacaagcactatatgccgaagccttcggaagataagcagtggttccagcctacgcgtgaaaccgagactgcgctcgttcatcagcaaaatatcaactttgtcgccgatcgtgattatcaatcggtcaacgtgcagggcaacggtgcgctggcggtgacgcaggatggctatgtgaacgttgactggaactggctggggcaacgctcgcgtgagcagcacatgcaggatgtgacggtcaataacgcctggtttcgtcaggacttgtggcgcaaatactatgtccaactgggggagatggatacccgagatttgttcagcaacgccgggggcaatatcacgctcagccagttgcctatcggtaagatccgcggcatgcgtgccggttctacacgcgcctggataaacccggttcaacaatcgcaagggacgccggtcactgtatttttgtcgcacgacgcgcgcattgacgcccggcgaggtaatcaactgctgggcagtttttacctgaatgccggtgcccagacgctggatactcgcgcatttcccgagggcagttatacggtgacgctggctatttatgaaaataatcgtctgttgcgtaccgaagacgtcccgtttacgcgcacgggaatgaccccctttgaccgtgtggaatggtttctgcaagccggcgaaacggacaatgactcgcagcaggacccacgctcacccgtagctcaggccggtgtgcgcctgccgataaccgccaccctggcgttaaccagcggcgcgacagtgacccgacaacatcgatttgcggaaaacgccctcgactggtaccacggttttaacaccggccctgtcgacggcgtcctgagcactcgttttagttacctttatggcagcgagggggagcgcggcaacattcagcaggtgagctacaacgacggcttttcgctgagtttctaccgcaacgctctggcggcggaaaactgcgacaaccgtaatgcgggattttacggcgtcagcggttgttatcgatcgctgtcgctgatgttttccgttccggtaggaagctggtatgcctcactgggctactccgacaatcgtaatgaggggcgctatatcgcccgacgcgacttgccctccgacgataacggtcgtgacaacggcttgccttgggagcagatgtacatgacccgttcgcacgcccgctcatggcagggtggcctcagtaattcgttcagcaccaacggattgaacatcaacagcagcatcaacctgtttatgcgcagtgaaaatcattctgctgccagggataaaggcggctacctgagcgttagcctgtccctggctcgtccgcgccagggcgaaagctccggctatacctcgcttggcgctacctggcaacaacagcaacggcaggcgggaaccctcagctacaacgtggcgcataattggtacaccgatgctcgcggagaaaacgaatatggcgtgggcgcttccggtatcaatggcgactcgctgaatacctccgtctatacccgtcagggcgggcagtacggtaacggcagcctgacgctgagcgatagttgggatcgccaggcacgccaccacaccctcagtagcagcggcaactacagttcgactttcgcgctttcccgttccggactctggttcggccgctggggagacggacgcccggcatcggctatcggcgtggatgtctcggcgcccgacgatcggcaaagttcccgaattgccgtagcgctggacaacggagggagtgcagaggtggccgccaaccgccgcgcgttatttgccgtgccgggttaccagcaaaccacgctatcggtgagcgaatcactggacgtctcccacggcgccagcagcgaaatcacgcagggctccggcagccggacggtctttatggtgccgggcaatatgctgcgtcgcgaagttcgcacggtggccagctatacctggcttggtcaactgaccgacgagcggcatttgccgctgtcaggcagtgtgccgttgaacgtcattggctggaacgatctcggagatggaggattcagcgcgcagagcgaggcgccgatcgaggcgttgtatctggtacgaaatcaacagttctatcaatgcgcgctgcaggtcaaaagcacgcgcgacgtcgtgcgctacgtcggcacggtggcctgtcgcgagatgactttctcggcgctgccggacaacgttcagcgccgggcgcaattaatgatggccggccgtgcacagccttcgggccagaccgccatgaatcatcaggaaacgactgccacagggagttcacgtgaaacgtttaattagtctgttcgtgttgttgatcttgtggagcagtcatacgttggcgggggctccggccggcagaaataccagcgtcagcttcagcttcgatcggctgacgccgcctgcccgttttgacatctggcggcatgagccgggtggctatgatcctgccgatccgcaaaagtggggccgtaatgccctgacctgcctgtcgcgtaccggtgctactaatggcgcctgcatgacggcgccggtctggtttagcgccaatcctgcggcgccttatgcgataaccctgcgttttactcatgaactgagtaagaagaccgtggacgtaaaagtctatggtgaaaaacacatgttcataaataacaaagtctttacttttgccagttatgtgaccggcggcagcgcggatatcgcagcctggaatagcgagccctattttgacttttatatcgtcagaagcgagctggaaaaactcaatcagccggggatctggagcgccaccctgaaacagaacctgcgtcagtggggaagcgccgactgcggagggaattttaacgacgccaacgtgggctgccccggctacctgacgatcgccaactggcaggcgaatattcgcctggaggtgattgattcaagcaatcatcagatttatttacccgcttttcctcactccgcgccggtggtgaatctgaacctgactatgagcaatctgccggggcgcccaggcgggagcgaaatcaaggggcaatcttcgttggacatgtgcctgtatgacggcaataactccgccagcagccgcgtgatattgcgcttcaccgacgatggcgtggcggcggcagatcgcgcggccggtgcgttttctgtctggcggcgaggcggcagccaaaccagcgcacgcgaccgggtggattatcaggtctcagtgactaacccggtgaccggcgcgacagaaaccgccagcaacggaacggatatcgtctggcagggcacgaatgatcggagcattcttcgccaggtcgttttgccaggcgggagtgaaagcgtgctgtgcgtgccggcaccgatagtgctcacgacgccgacgtttgccgccgaaagtaaaacggcgggtgactataccggcacgctccacgtgatttataccccaagcaccctgtgaatgagagtcgcatcgtgaattacgccattttggacgacaatcacttctacgccgaaggccttagatatttaattttgcgcgaaggtgaaaatagccagattactacggatgatattcggtggcactggagactgctgacgatggatatcattgccgtgcgatgccgcttttcgctgacggcgagccaacagacattgctcgacattttatcgaggctggggaccggtcaatggaacggcagggtgtatctttgttgcaatgcacagagccgggccttggccatgcgtatgcgcaagcgatatatctcgttagagatccatcttctggacgacggtcaaagtctgcagaaaacggcccagctactggctcaagggccagcgctccccgccgttcagtgtctggatcccagtctcaccgatgctgaatttaccgtactgaatttattaactcgcggatttccagtacggcgcgtggccagaaccgcgcgcatgacggaaaaaatcgtttcacagcataaatgcaatgcgctgaaaaaactcaacgcccctaatttactcaggcttttgaatccggcatgacgtcaaggtaaaaacgtcagggaaatcgtgaactcatcgagggggcaaggattgccttgttgtctttggccccctctcaaaccccaccagcagcaatgcgtttcggcagcaattcgacccatggtgtcacttcttggcaggatgcgcggtgacgttggcgggcaggctgtcgcccagggtgatcagctcgtccagcaacgtcatcagctggtccattttctgccgcgagaaagcggcttcaatctcggcgtagccctgttccacctggtggcgcgccacttcatacagatcctgcccctgctgggtcagcgacacgtacagcttgcgctgatcgttgaccggcttgaggcggaagatcagtttgtcgcgctccatgcgcgacagaatgccggtcaggctggggcgcaggatacaggtttccgccgccagttcgtggaattcgatcgagcggctgttggccagcacgcggatgatgcgccactgctgctcggtgagattgtggcttttcaggatcgggcggaagaaccccatggcggtttcacgcgcctgcagcagggcgatggttaacgattcatgcataagtttggccttagctatcaaggtgttcgctgttacggcgctcgtcatgggggcgcctgccccgcaaagcccgatttgttaataacttaatagtagccaaagttacccgcagggataaagcaaaaatgcgtagcgcagcgaaaaatggcgagaaaaatgattaatacgttgaataatcacgccaatgtttgttgtttgtgaatattttgttatcacgatcacaaatcattccaagcgcgttgcgtaaaagctgcgcagcgtataaaagtaatcattaatatattaatgaatgccggttgtcatgttttgccattggaggagttcgcatgaaaggcaccgtattttccgttgcgctgaaccaccgcagccaactggacgcctgggatcaggcgtttcaccagccgccgtaccagaccccgcccaaaaccccggtgtggtttatcaaaccgcgcaatacccacctcgccaacggcggggcgatcccgtttccggccggtgaaaccgtgcagagcggcggcacgctggcggtgatcatcggcgacaccgcgcgcaaggtgccggcagcgcaggtgagccgttatctggccggttacgcgttggccaacgacgtcagcctgccggagagcagcttctatcgcccggcgatcaaggccaaatgccgcgacggcttctgcccgctgggggagatggggcagttggagaacgccgatcgactggagatcgtcaccgagatcaacggcgtggagcgggatcgctggtccaccgccgatctggtgcgctcggtgccggagctgatcgccgccatcagcgatttcatcaccctgcagccgggcgatgcggtgctgatcggcaccccgcaccagcggatagagatcaaaccgggggatgaggtgacggtgcgcgccgccggcctgcccacgttgagcaaccgcgtcactcaggcaggagccgcatcatgaaacatgcccgtattcgccatcatggccagatcgtcaacgttcaggtagacgaccagctgcgcgtcacgctgccaaacggcgaggtgctgcaggagcgtgaagtggaatggctgccgccggcgcagggcacggtgttcgccctggggctgaactatgccgaccacgccagcgagctggaattcaaggcaccggaagagccgctggtgttcctcaaggcgccgaacactctgaccggccatcgtcaggtatcggtgcgtccggccgacgtggagtacatgcattacgaagccgagctggtggcggtgatcggcaagaccgcacgcaacgtcagccgcgagcgcgccatggagtatgtggcgggttacaccctgtgcaacgactacgccatccgcgactacctggaaaactactaccggccgaatctgcgggtgaagagccgcgataccctgacgccgatcgggccgtacatcgtcgatcgcgacgacgtcgccgatccgcaccggctggcgctcagcacctacgtcaacggcgagctgcgccagcgcggcagtaccgccgacatgattttcgacattccgttcctgatcgcctacctgagcgaattcatgacgctgcagccgggcgacatgatcgccaccggcacgccgaaagggctggccgacgtgcggccgggcgacgaagtggtggtggagatcgagggcatcggccgtttggttaaccacattatcagtgaaaaagattacgaggagagcctacgatgaaaaccatcaaccactggatcaacggcaagaacgtcgccagcaaagagtatttcaccaccaccaacccggcgaacggcgaggtgctggcggaagtggcctccggcggccagctggagatcgaccaggcggtggcggccgcgaaagaggctttccccaagtgggccaacacgccgatgaaagagcgcgcgcgcctgatgcgccgtttgggtgaactgatcgaccagaacgtgccgcagatcgccgaaatggaaaccgccgacaccggcctgccgatccatcagaccaaaaacgtgctgatcccgcgcgcctcgcacaacttcgaattcttcgccgaggtatgccagcagatgaacggcaagacctacccggtggacgacaagatgctcaactacacgctggtgcagccggtgggggtctgcgcgctggtgtcgccgtggaacgtgccgttcatgaccgccacctggaaaacggcgccttgcctggcgctgggcaacacggcggtgctgaaaatgtccgaactgtcgccgctgagcgccgatcgcctgggcgagctggcgctggaggccggcattccggctggggtgctgaacgtggtgcagggctacggcgccaccgccggcgacgcattggtgcgccataaagacgtgcgcgcggtttcgttcaccggcggcaccgccaccggccggcgcatcatcgaaagcgccgggctgaagaaattctccatggagctcggcggcaagtcgccggtgctgatctttgaagacgccgacatcgagcgggcgctcgacgccgcgctgttcaccatcttctcgatcaacggcgaacgctgtaccgccggttcgcgcatcttcattcaggagagcatctatccggaattcgtcaaacgcttcgccgagcgcgccaaccgtctgcgcgtcggcgatccgcaagatcccaacacccaggtgggggcgctgatcagcccgcagcactgggaaaaagtctccggctatatccgcctcggggtggaggaaggggcgaccctgctggccggcggcccggataaaccggccggcttgagccacggcaacttcctgcgcccgacggtgctggcggatgtcgacaaccggatgcgcgtggcgcaggaggagatcttcgggccggtggcctgcctgctgccgttcaaatcagaagaagacggcctgcgcatggccaacgacgtggagtacggcctggcgtcgtacatctggacgcaggatgtgagcaaggttctgcgcctggcccgcggcatcgaagcgggcatggttttcgtcaacacccaaaacgtgcgcgatctgcgccaaccgttcggcggcgtgaaagcctccggcaccggccgcgaaggcggcgaatacagcttcgaagtgttcgccgagatgaagaacgtgtgcatttccatgggtgatcacccgatcccacgctggggcgtttaatcaggcctcggcatcgttcacggaatcatttttgtttcatgtgaggacttatgggtaagttagcgttagccgccaagattacacatgtgccatcgatgtatctgtcggaaatccctgggaaaaactttggctgccggcaggcggccatcgacggccataaagagatcggcgcgcgttgccgcgagatgggcgtcgacaccatcgtggtgttcgacacccactggctggtgaacagcgcctatcacatcaactgcagcgcgcatttctccggcgtgtacaccagcaacgagctgccgcatttcatccgcgacatgacttacgactacgacggcaacccggcgctgggccagctgatcgccgatgaagcctgcaagcggggcgtacgcgccaaggcgcacgacatcccgagcctgaagctggaatacggcacgctggtgccgatgcgttacatgaatgccgacaagcatttcaaggtggtgtcgatctcggcgttttgcaccgtgcatgacttcgccgacagccgccggctgggcgaggcgctcaaaagcgccatagaaaaatacgacggcaccgtggcggtgttggccagcggctcgctgtcgcaccgctttatcgacgatcagcgcgccgaagagggcatgaacagctacacccgtcagttcgaccagcaaatggacgaacgggtggtcaagctctgggaagaggggcgctttcgcgagttctgcgaaatgctgccggagtatgccgattattgctacggcgaaggcaacatgcacgacaccgtgatgctgctgggcctgctcggctgggacaagtacgacggcaaggtggagttcatcaccccgctgttcgccagttccggcaccgggcaggtcaacgccgtgttccctttgcccgctgaagcctgaggtgtgtgaatgccccatttttacgctgaatgtaccgacaatatccgccgcgaggcggatttgcccaccctgttcgccaaggtcaacgaggcgctggcggcgaccggcatcttcccgctggccggcgtgcgcagccgggccatctggctcgatacctggcagatggccgacggcaagcaggattacgccttcgtgcacatgacgttgaagatcggccacggccgcagtctggaaagccgtcagcaggtgggcgagatgctgtttgcgctgatcaaggaacacttcgccgcgctgatggcgcagcgttacctggcgctctctttcaccatggaagagctggatccggtgctgaattacaaacagaacaatgtccacgcgctgttcaacaaggcgtgaataaggggtcgtaaatgctggataaagagcaggttaaccgcgccgtgcagcgtctgcatcaggcggaaaagagccgtgagcagatccgcgcgttgtcgctcgatcatcccgagatcaccattgaagacgcctatgccattcagcggcagtgggtagatctgaagatcgccgaggggcgcacgctcaaaggccacaagatcggcctgacctcgcgcgccatgcaggtgagctcgcagatcaccgagccggattacggcgcgctgctggacgacatgttcttcaacgacggcagcgacattccgatcgatcgctttatcgtgccgcgggtggaagtggagctggcgttcgtgctggccaagccgctgcgcgggccgaactgcacgctgttcgacgtctacaacgccaccgactacgtcattccggcgctggagatcatcgacgcgcgcagccacaacgtcgatcccgagacgcagcggccgcgcaaggtgttcgacaccatctccgacaacgccgccaacgccggggtggtgatgggcgggcggccgatcaagccggatgcgctggatctgcgttggatctctgcgctgctgtaccgcaacggcgtgattgaagagtccggcgtggcggcggcggtgctcaaccacccggccaacggcgtggcctggctggccaacaagctggcgccgtatgaggtggagctggaggcggggcaggtgatcctcggcggttccttcacccggccggtgccggcgcggcgcggcgatactttccacgtcgattatggcccgatgggctgcatcagctgccgcttcgtctaataagcaggctcggcgaaccgggccgcactaaaccgggcgggggccaagcgccgcgcccgcttgtcagggagaatacgatgttaaccaaccacttcaagcgagcgctgcaggaaaaacgcccgcagatcgggctgtggctcgggctgtgcagcagctacagcgccgagctgctggccggcgccggtttcgactggctgttgatcgacggcgaacatgcgcccaacaacgtgcagacggtgctggggcagctgcaggcggtcgccccttaccccagccagccggtggtgcggccgccgtggaacgacgcggtgatcatcaagcaactgctggacgtcggcgcgcaaaccttgcttatcccgatgattcagaatgccgaacaggcgcgcgacgcggtgcgcgccacgcgttatccgccgcacggcgtgcgcggcgtcggcagcgccctggcgcgcgcttcgcgctggaaccgggtgcccgattacctgcagcaggccgacgagcagatgtgcgtgctggtgcagattgaaacccgcgaggcggtgaaaaatctggaggcgatcctgcaggtggaaggggtggacggcgtgttcatcggcccggcggatctcagcgccgacatgggcttcgccggcaatccgcagcatccggaggtgcagcgcaccatcgacgacgccatcgcgcgcatccgcgccgccggcaaggcgccgggcattctgatggccaacaaggcgctggcgcagcgctatctggaagccggcgcgctgttcgtcgcggtaggggtggataccaccctgctggcgcgggcggcggaagccctggcggacgagttcaaacagggcggggcgcaagcgccttcatcgggagtctactgaaccatgaaccacgtcgattcgctgccgccggccaacccggcgcagcaacataaagcgttaaccgccgccgagcaatcggtgattaaaaagttgtttcggcgcctgattattttcctgttcgtgttgtttgttttctctttcctcgaccgcatcaacatcggcttcgccgggctgacgatgggcaaggatctcggcctcagctcgaccatgttcgggctggcggcgacgctgttctacgccacctacgtgatcttcggcattcccagcaacatgatgctgagccgggtcggcgcgcggcgctggatcgccaccatcatggtgctgtggggcatcgcctccacctgcaccatgttcgccaccgggccgaccagcctgtatgtgctgcgcatgatcgtcggcatcaccgaggccggcttcctgccgggcattctggtgtacctcacctactggttcccggcgttctaccgcgcccgcgccaacgccttgttcatgatcgccatgccggtgaccatggcgatcggctcgctggtctccggctatattctggcgctggacggggtgatgaacctgaagggctggcagtggctgttcctgctggaaggcattccgtcggtgctgctgggcgtggtggtgtggttctacctcgacgacacgccggccaaggccaagtggctgaccgacgaggaaaaagccagcctgaaggcgatgatggaggccgataagctgcagctggtgcagcccaacgggccgagcagccaccgcgcgctgcagcagcgcagcctgtggcgcgagatcttcacgccgatcgtgctgatgtacacgctggcctatttttgcctgaccaacaccctgagcgcgatcaacatctggacgccgcagatcctgcagagcttcaaccaggccagcagcaacgtgacgatcggcattctggcggcgatcccgcagatctgcaccatcgccggcatggtgtggtggagcaaacgatccgatcggctgcaggagcgtaagcatcacaccgcgctgccgtacctgttcgccgccgccggctggctattggcttccgccaccgatcacagcctgatccaactgctggggatcgtgatggcgtcggtcggttcctttaccgccatggcgatcttctggaccacgcctgatcagtcgatcagcctggaagcgcgggcggtggggatcgccgtgatcaacgccaccggcaacatcggatcggcgctcagcccgctgttgatcggctggttcaaggacatgaccggcagcttcaactccgggctgtatttcgtctcggcgctgttgatcgtcggcgccgtgctggtgtggcgcatcccgatgaaggattcgcgcccgagagcgacgccttgatacgcagacaggcaggattgcaggaggtaatgaggtgcggaaaagtaccggttttatcgccaacatcgatatttgcaaagagtatgacgcgcgctacgccgccgacgaggtgcactacgaaaccttcgccgggctggcggcattcttcggccgcgacatgcaggtgcactggcacgactgcttcttccaggtgcattttctggagaccggcaagatagagctgcagctcgacgatcagcactattcggtgcaggcgccgctgttcatcctcacgccgccgtcggtgccgcatgcgttcttcaccgaaccggacagcgacggccacgtgctgacggtgcgtcaggagttgatttggccgctgctggagcgcctgtaccccggcagcaacctggcgctcgacatgccgggcatctgcctgtcgctggccgacgcgccgcaggagctgacggcgctcagccactattgggcgctgatccgccgcgagttcgcgcagaacctggccgggcgcgaacagacgctggcgctgctggcgcaggcggtgttcacgttgctgttgcgcaataccgcgctggaagacagcgccaacagcggcgtgcgtggcgaactgcagctgttccagcgcttcaacaagatggtggacgagcgtttccgcgagcatctgccggtgccggagtatgcgcaggcgttgggagtgaccgaatcgcggctcaacgacctgtgtcggcgcttcgccaaccggccacccaagcggctgatcttcgatcgattgctgcgcgaggccaagcgcatgctgctgttcagcgcctgcacggtgcatgaaaccgcctacagcctcggcttcaaggatccggcctatttcgcccggtttttcaatcggctggaaggctgttccccttcaacctaccgcgcggcgcaacacgccctttcgtaaccgcgatcacagtttgctgcgaaagcggcaaactgacctgaaaagtaccggcgattgccgcaaaagtctcttctcgaaaccggctttggcagcttcaattaagcaaccaaaagaaaacattattttaacaaatggccgactccacggcctgaaaaatgccgatgacgaggaagacccgatgaaaccagaagactttcgtgccgacagcaagcgtccgttcaccggcgccgagtacctgaaaagtttgcaggacagccgcgaaatctacatttacggcgaacgcgtaaaagacgtcaccacccacccggcgttccgcaatgcggcggcctcggtcggccagctgtacgacgcgctgcacgatccggccagccaggatcgcctgtgctggaataccgacaccggcaacggcggctacacccacaagttcttccgctatgcccgcagcccggaggagatgcgccagcagcgtgacgccatcgccgactggtcgcgccaaagttacggctggatggggcgcacgccggattataaggcggccttcggctgcgcgctgggcgcttatccggagttctacggccagttcgccgacaacgcgcgccactggtacaaacgcattcaggaaaccgggctctattttaaccacgctatcgtcaacccgccgatcgatcgtcataagccggtcaacgaggtgaaggacgtctacattcaggtggagaaagaaaccgacgccggcatcatcgtcagcggcgccaaagtggtggccaccaactcggcgttgacccactacaacttcatcggtttcggttcggcgcaggtgatgggcgataatccggacttcgcgctgatgttcgtggcgccgatggacgccgaaggggtgaagctgatttcgcgcgcctcctacgagctggtggctggcgccaccggatcgccgttcgactacccgctcaccagccgctttgacgagaacgatgcgatcctgatcatggatcatgtgctgatcccgtgggaaaacgtgctgatctaccgcgatttcgaccgctgtcgccgctggagcacccagggcggtttcgcccggctgttcccgctgcaggcctgcgtgcgcctggcggtgaagatggacttcatcaccgcgctgctgcaaaagagcctctcgtgtaccggcgtgctggagttccgcggcgtgcaggccgatctgggcgaagtggtggcctggcgcaacctgttctggtcgctgagcgacgcgatgtgcgccgaagccacgcaatgggaaaacggtgcctacctgccggattccgccgcgctgcaaacctaccgcgtgatggcgccgatggcctacaccaaggtgaaacacatcatcgagaagaacgtcaccagcggcctgatctacctgccgtccagcgtgcgcgacatgaacaatccggagatcgacaagtacctggcgcgctacgtgcgcggatcggacggcatggatcacgtcgaacgcatcaagatcctcaagctgatgtgggatgcgatcggcagcgaattcggcggccgtcacgagctgtatgagatcaactacgccggcagccaggatgagatccgcctgcagtgcctgcgccacgcgcagggatccggcaacatggatcgcatgatgcagatggtcgacaagtgcctggccgattacgatcagcatggctggaaggtgccgcacctgcggaacaatgacgatattaatcagttggataatctgctgaagtaattcaggaggaggttgtatgtctcaggaaaatgaacagcggttgcgctttcgcgacgcgatggccagcctgtcggcggcggtgaatatcgtcaccaccgacggcccggcggggcgctgcggcatcaccgccacggcggtgtgctcggtaaccgatacgccgccgacgctgctggtgtgcatcaaccgcaacagcgcgatgaacccggtatttcaggaaaaccgcaggctgtgcgtcaacgtgcttaaccacgagcaggagctgatggcgcgccacttcgccggcatgaccggcgtcagcatggaagatcgtttcaggctggaagagtggcagcttggcgcgttggggcagcctgtattgcgcaataccctggccagcctggaaggggagatcgagcagatccagagcatcggcacccaccagatgtacctggtgcagatcaagcagatcgcgctgagtgaagccggcaacggcctgatctatttcaagcgcaacttccattcggtgatccaccagatggcggtgccggcctgaggcgtgggggcgcagttggctgcgcccctcatctcaactcttgttggccgccagatcgctcaccaggcggttgaccggatcgctcatgttggtgaacttgctcagctccgaacgggtcaccaccacgaacaccccgacgtttttcgccgggatcatcgccatgtaggtaatgaatccgccgccgccgccggtcttctgaatgatgcccggcagcccgtccttcggcgccatatacacccagcccaatcccaatgcatccgcttgtcccggcacgtccatgcccttcagcgacaccagatcgtggcgctggaagtacatggtttgctcgctggcggcggtggctttgcgcgggccgctggcgctggaagagaggaactgctgcatccagcgctgcatgtcgcgcggggtggagtagacgccgccgctgccggccgcggcggtggtgtcgcgacaggcgctcgggccggccgccgccaccatcaggcgcgagcactgttcggggctcggcgtcaacgtggtgtcgaccatgccgagcggcgcggtgattttctctttcagcagcgcgctgtaaggcttgcccgcggcgcgcgagagcgcgtcggccagcagatcgtacgccaggttggaatacgcggcgcgcacgcccggcggcaccgtgacgttggcatgcgccagccattgccagcgctgagccttggtcggccaggtgaataccggcgttttcggcggctttttgcccggctgctcgcgcggcaacgcgctggtgtgggtcgccaggtttaataacgtgatcggctggccggcgttgtaagacggcacataggcgcccttgggagcgtacttgcgcagcgggtcggtcagcttgacctggcctgccgccgccattttcaccatcacttcgctggtcatcagcttggtgatcgaggcgatgcggatcagcgaatccgggcgcgggcgcaggttgttgccgggcttggtgtcgccgaagctgcggttaaccacctgattgccgtcgatcaccaccagcgccatgccggtggcgccgctgttgtagaaaatatgttcggcatactggtcgacgatttgcgaagccagctgcgggggcgcggcctgcacggccagcggcgcggcgcacaggcccagcgccagcaataaagcggagacagagttcttcaacggtcgttatccatttaacaatgcagcgggaaagggcgtaatccatcgcccagtgtaatgcgcccgcccccccgctgcatgtagaaaaaagagcggtggcgataaaattttttaaccgccggcggcttactgcgcgcgggcgaaaatggcgatcacttcgtccaggtgcgccttcatcgccttgcgggcgccgcgcacatcgcgcgcttcgatcgccgccaggatcgcccggtgttccagctcggagcggtgcggcatgtcgtccggcgtatagtggcgctgcagcacgcggaacatgctgccgtagcggtggccgagcagatgaccgatgatgaacgcgtaagccgggttgccgctggcctgggcgatgcggatgtggaacagccgatcgccggggtgggtggcggagccggcgcggttatcgcggcagttctgctcataggcggcgcggatgcccgccagctcctcgtcggtggcgtggcgcgcggccagcgcggcggtctccggttcaatcagcaggcgggtttgcagcagtgaaaacggcggcagctcggcgttgaaatccagctcgatattcagttcgtcgtcgatctccgcccactggttgcggccggcctgggccatcaccgactcctgcgacgccgccggtggcgtttgcgaacggacgatcaccccgttgcccactttgacgtccaccaggccgatcacttccaatgcgatcagcgcctcgcgcaccgacgcgcggctgacctgcaattgctgggcgagatcgcgctccgagggcaggcggctgccaggcggaaattcgttattctcgataagacgtttgagctggtcggctatctgtctgtaaatccttgggttttccagtcgggtaatcggcatttttgacctttgacgattcggcgttcagtgatttggcgcacaattatgcgacaaggcgcttgagtaatcgttattcaagtgtaaaaaaatggttaattgaaatgtggtttcaaggctgttttattaacttcttcccccaacgataacgcgtaaagcgtcttttgtcatgttagaggcctgacctttaatcgcccttagtggcctgaccattagacctttaggccgaggagtcaagatggatttaaccgggaaacgcgtactgatcaccgccgccgggcaagggatcggttttaccaccgccaggctgttcgccgccgccggtgccgaggtgatcgccagcgacatcaacctcgagcgcctgcagggctgcgccgggatccgcgcgctggcgctgaacgtcaccgatccggccgccatcgcggcggcggcggaggcgatcggcccgatcgatgtgctgttcaactgcgcaggcgtggtgcacagcggatcgatcctcgattgcagcgaagatcagtgggcgttcgcgctcgatctcaacgtgaccgcgatgttccgcatgatccgcgccttcctgccgggcatgttggcgcgcggcaaaggctcgatcatcaacatgtcctcggtggcttcgagcgtgaaaggggtgccgaaccgcttcgcctacggcgccagcaaagcggcggtgatcggcctgacgcgctcggtggcggcggattacgtcacccagggcatccgctgcaacgccatttgccccggcacggtggaatcgccgtcgctgcgccagcgcatcaatgagcaggcgcgcgaacaggggcgcagcgagcaagaggtgtatcaggcgttcgtcgcccgtcagccgatcgggcgcatcggcaccaccgaggagatcgcccagttggcgctgtatctggcctccgacgccagttcgtacaccaccggcacggtgcagatcatcgacggcggctggagcaactgagccgccatttttgagagaggaacgcatgaaacttttacgttacggggaacccgggcaagagcgccccgggatgttggatgcgcaaggtcgcctgcgcgatctgtcgcagcatatcgccgacgtgggcggcgccgcgttattgccggcatcgctcgccaaactgcgcgcgctggacagcgccgcgctgccgctggtcgaggggcagccgcgcctcggcgcctgtgtcggcggcatcggcaagttcatctgcatcggcctgaactacgccgatcacgcggcggaaaccggcgcggctattcctgaagaaccggtggtgttcaacaaatggaccagcgcggtggtcggcccctacgaccgggtggagatcccgcgcggctcgcagaaaaccgactgggaagtggagcttggcgtggtgatcggcctgggcgggcgctacatcagcgaaacggacgcgatgagccacgtcgccggttattgcgtgatcaacgacgtctcagaacgcgaatatcaaattgagcgcggcggcacctgggacaagggcaaaggctgcgacaccttcgggccgatcgggccctggctggtgaccgccgacgagatcgccgatccgcacagcctgaacctgtggctggaggtggacggcaagcgctatcaggacggcaacaccagcaccatgatcttccgcattccgcagatcgtcagctacctcagccgctttatgagcctgcagccgggcgacgtgatctccaccggcacgccgccgggcgtcggcatggggcagaaaccgcagcccatctacctgcgggcgggccagacgatgcgtctgggcatcgaagggctgggcgaacagcgccagcaaaccgtacaggcttaaccgggagcgccgccatgaccaccattaccgcactgcgggttgaagacattcgtttccccacgtcgctggggctggacggatccgacgccatgaatccggatcccgactattccgccgcctacgtgatcctggagaccgatcgcgcggatctcagcggccacgggctgacgttcaccatcgggcgcggcaacgagatctgctgcgcggcgatccgcgcgctggagcatcagatcgtcggcgagcggctggagacgatcgccgccgacatgggcgccttctggcggcgcttcaccagcgacagccagctgcgctggatcgggccggacaaaggcgctattcacctggcgaccggcgcggtggttaacgcggtgtgggatctgtgggccaaatcggtcggcaaaccggtgtggcggctggtggcggagatgacgccggaggagctggtgcgctgcatcgacttccgttacatcaccgactgcatcacgccgcaggaagcgctggcgctgctcaagcagcgggccgagggcaaagaacgccgcctggaacgactgctgcaggaagggtatccctgctacaccacttcggcagggtggttgggttatccggacgacaagctgcgccgcctgtgccaggaggcggtcgacgccggtttctcctacctgaagctgaaggttgggcgcgatctggaagacgacattcgccgggtgcgcatcgcgcgtgaggtgatcggcccggatcgccggctgatgatcgacgccaaccaggtgtgggaagtcgatgaagccattccgtgggtgaagcatctggcgttcgccaaaccctggtttatcgaagagccgaccagcccggacgacgtggaagggcatcgccgcatccgcgaaggggtggcgccggtcaaggtggctaccggcgagatgtgccagaaccgcatcatgttcaagcagttcatcatgcgcggcgcggtggacgtggtacagatcgacgcctgtcgcctcggcggcgtcaacgaagtgctggcggtgatgctgatggcggccaaataccagctgccgatctgcccgcacgccggcggcgtcgggctgtgcgaatacgtgcagcacctgtcgatgatcgacttcctgtgcatcgccggcacccacgagggccgggtgatcgagtacgtcgatcatctgcatgaacactttgtcgatccctgcgtgatcaagggcgcggcctacatgccgccgagccgtcccggttactcgatcgagatgcatccggcgtcgatcgagcagtatcggttccgcgggtgaagcggggggatcgcatgccgcgcatcgacgctcaccagcactactggcgctaccacccgcagcattacccgtggatcgacgagcggatgcgcgtgctgcggcaggatttcgatccgccccggctgcggccgctgttgcaggaacacggtttcgacagcgcgctggcggtgcaggcgcgccccagcgaggaagagacgctggccttgctggcgctggctgagcagagcgagggcgtatgcggcgtggtggggtggctggatatcgcttcgccacagctggcgcagcgtctggaaactttgcggccttatcgcgcgctgcgcggggtgcgccatcaggtgcaggacgaagcggatccggcggcctggttggcgcggccggaggtggaacgcggcatgcaaacgctgcagcgcgccgggtatgtgtacgagatcctggtgacgcaccggcatctggcggccgcggtggcgctcgccgcccgccatgacgagcactggctggtgctggatcacctcggcaagccggacatcgcccgcggcgcgcggcactgggcgcagcaaatccggccgctggcggcgctgccgcacgtggcctgcaagctctcgggactgatcaccgaggcgccgggcgggcggtggcgggcggaggagctgctgccgttcttcgacgccgcgctggaggctttcggcccgcagcggctgatgttcggctccgactggccggtgtgcctgttggccggcgactaccgccaggtggtgcaactgtgcgaacaggcgctgtcgacgctgggggccgccgagcaggcggcgatttggggcggcaccgcctggcgaatttacggtttaacggagtctggttatggatctgtatctgcaagataaggtggtgttggttaccggcggcggttccggcattggcgcggcgatttctcatgtgctggccgaggaaggggcgatcccggtgctggtcactaacgccgcgccggaggcggcgctgctggccgatttgcagcggctgcagccgcgcaccgaggtgatcctcaccgaattgtgcgacgaggcggcctgccgccgggcggtcagccatacgctggcgaccttcggccgcatcgacgggctggtgaataacgccggggtcaatgacggcgtcgggctggaggcggggcgcgaggcgttcgtcggctcgctggaaaagaacctggtgcactactacctgatggcgcacctgtgccaggcggcgctgcgggagagccggggcgccatcgtcaacatcgcctccaagaccgcgctcagcggccaggggggcaccagcggttacaccgccgccaagggcgcggtgctggcgctgacgcgcgaatgggcggtatcgctgcgccatgagggggtgcgggtgaacgcggtggtgccggcggaggtgatcaccccgcagtaccagcgctggctcaacaccttcgccgagccgcagcggcagatggataaaatcaccgcgcgcatcccgctcgggcagcgcatgaccacgccgcaggagatcgccgacaccgttgcgtttctgctctcgtcgcggtcatcgcacaccaccgggcagtggctgtcggtggacggcggctacctgcatctcgatcgggcgctgacgtgagcggcgcggcggcagggcggcgccgtttctgccaggcgctcgatctgattgactcaccggcgctgattgcggagtaccagcagcatcatcagcgcatttggccgggcatcgccgcgcatttgcgcgagcacggcattctggacatggaaatttaccggttgggcacccggctgttcatgatcgtggaggtcagcgccgatttcgacgccgcgcgctttgacgccgccagcctgaacaaccccgaagtacagcgatgggaagcgctgatgtggcactaccaggccgccaccccctggacgccgcagggcgaaaaatgggtggaaatggcgcggattttctctctgcaacagcaataacgccaacatcatcatcgccagacgatacgagggtatcaccatgcttgctgaaaaaagtgcggcctccgcgcagccgggcgtccccgtgaccgccaatctgcgctgggcctttatcctggtcaccagcctgttcttcatgtgggggctgtcctacggcctgctggacgtattaaacaaacattttcaggagacgttgcacgtcaccaaggcgcagtcggggctgctgcaggcggcctacttcggcgcctatttcctggtggcgctgcccgccgggtactttatggatcgcaagggttataaggcgggcattctggtcgggctgtgcctgtacgcgctgggggcgctgctgttcgtgccggcggcgtcggccaacagcttcggcgtgttcctgtttgcgttgttcgttatcgccagcggcctgggctgcctggaaacggcggccaacccttacgccacagtgctgggcgacgcgcagggcgccgaacggcggctcaacctggcgcagtcgttcaacggcctcgggcagtttatcggcccgctgatcggcggcacgctgttcttctccgccagccagtccgccggcgacggcgatcagagcgcggtgaagatgacctatgtggcgatcgccgcgctggtgttgctgatcgcgctgttgttcagccgcacccggctgccggcgatccgcgaagaggaaaaaccggtgcacggcgtgatagcgcagggattgtggcagcatccgcatttcgtcggcggggttatcacacagttcttctacgtggcggcgcaggtgggcgtgggggcgttcttcatcaactacgccaccgagcactggcgcgaggtgtctaaccagaacgcctcttacctgctgtcgatcgccatgatctgctttatggtcgggcgcttcttcagcacctggctgatggggcgagtcaaaccggcgacgctgctggcggcctatgcgctgatcaacatcgcgctgtgcggcgtggtgatgctgagcgtcgacggcgtatcggtggtggcgctgatcgcggtgttcttctttatgtcgatcatgttcccgaccattttcgccctgggggtgaaaaatctgggcaagcacaccaagcgcgccagctcctttatgatcatggcgatcgtcggcggcgccatcatgccttactttatgggggcgctggccgaccgttacagcaccgcgctctcttatctgctaccgctgctgtgcttcgcggtggtgctggtttacggcctgcggcagcgccgcgcctgattcaccccggcggcgaatcggccttcgccgccgcttttggcatctgccgccgggttcccatcaggatggccaacgccagcagcagcaccaggccggacagcgcgccgtttatcgtcaggccgccggcatccaccaccagcccgcccaccagtgaaccgcaggaaatcgccaggttaaacagcgcgatatacagcgaagaggcgacctcggccgcatcgggcgccgccttgagcatccacgccatcagcgcaacggaaacgccaccgtaggcgatgccccacagcagcaggaaggcgccgccgctcagcggcgcgtggcccagcagcggcagcagcaggacggcgagcgccagcccgagggcgatcagcgccagggtgcggcgcagccgtttggcggcggcctggccggcgatgaaattcccgacgaggccggcgacgccgtaggcgaacagcagcggccccacccagcggctctcgataccggagaccgtctgcagcagcggacggacaaaggtgtaagccataaagtgaccggcgaccagcaaaaacgtcagcagcagcccggtcagcagccggcgattcgcgcgctgcgcggtgaacgacctccagcttatcgcctgcgtgaccggcagcggcggcagcacgcacaccagcagcagcagggtcagcgccgccagaacggcgaccgccagaaacgccaggcgccagcccagcgcttcgccgaggaataccccgagcggcacgccgaacaccgaggccgccgctacgccgccgaagatgacggacagcgccaatccgactgaggccggcggcaccaggcgttccgccagcccgccggcgatggcccagataccgccgatgcaaaaacccagcaggatgcgcgcggcgaacagcagggccagggaggtggcggcggcggccagcaggttagcggcgatcagcagcagcagaaagcccgccaacaggccgcggcggtccgtgcgccgggcgcccagcaccaccagcggggcgaacagcgcggcgaacagagccggcagggaaatcagcagcccggcgcggccgatcgtcgcgttcagtgtattgacgatcgggctcagcagcccgacgggcagcatttctgcggtgacgacggtaaaggtggacaggccgaccgtgaaggtggccagccacgcttttgcgccgccgtcggcgtgtaaggcactcataatgactctcccaacagatgaagaacttcagtgtatccgcgccaaaatggctgataaactggcctgaatgcgcaacattggggacaaatcgtggctaatttaccgtctatgccgttggataacctgaccgacctgctggtattcattcgcgtcgccgacgcctgcagcttcacgctggcggccgagaggctgggcatctcccgttcggcggcgggcaaatgcgtgacccgattggaggcgcgattggcgacccggctgctgcagcgcaccacgcgcagcgtcagcctgaccgaagacggcgcggtgttttacgagtatgcgcagcgtatcctgtcgcaggccgaagaggcggaaacggcactcaatacgcggcggcaaaccccgcgcgggcggctgcggctggatgtgccggtctcgttggggcgattgcacattttgccgattttgcgggagtttttggcgcagtggccggaggtggacgccgacgtcagcttctccgacgattacagcgatttggtgcgcgacggcatcgacgtggcgatccgcgtcggcggcagcgacgacagccgactggtgcggcgggtgctcgcgccgcaccgcctgatcacctgcgcggcgccagactatctggcgcggcacggtacgcctgggaaaccggaagcgttgggcgatcatgagacgctggtcttcagccatcaggggttgccggcgccgtggcgctatcgggttaacggtcaactgcacgaacagccggtgcgcggccggatgcgtttcaacaacgtcgaggcattgcgtgatgcggccgtcgccggggccggtctgtgtcaggtaggagcgtttctggtcggcgagcagattgcggccggcacgctggtgccggtgctggagcgctattgtcgcccggggccgccgatctgcgccgtctatcccagccggcgccacctctcccccaaggtgaaactgtttctggcggcgatcgaacggcgctggcagggcaaggcgatttgggaaagcgcctagcgcgagcggttcatgccgcttgcacggccagcgttcgccgcattaagcgatagccgccggccgccaccagcagtacgaccaggccggccgtgagcgtgacgccaaagccggccttgatccccaccgcatcgatcgccagccccgccagggcggcgccgagcgccacgccaacccccaggccggtcaccatccaggtcaatccttccgtcaagcgtgaaggcggcacgaggcgttcaactaaccccatggcgacgatcatggtcggcgcgaaaaacagtccggcgacaaacatcgccgccgccagcgttaagacattgtgcacccacagcagcggcagcgtggtgagtgcggtggcgaaggcggcgtataagaactgccgaggcaatggggacggcagctttattgcgccgaaaatcagcccggcgaggcaggagccgcctgcgtaaaccgacagcacgatgctggcggcggccggctgcccctgctgctcggcgaaggccacgctgatgacgtccacggtgccgacgatggtgcccagcgcgatcagcgccagcaccaggatctgcatcgacggcatggccaggatggcgcgctgccgctggttattgcggggataaaccgggggctgagtgcttttttgccaggcgaatgccgaaacgcccgccaccagaagcagcgcggccgccagagggccggcctcagggaagagcgcaacgctgagccccacggcgatcggcgggccgacgataaaggccacttcgtccaacaccgactcgaatgaaaatgccgtgtgcagctgtggcgtgccgcgatagatttcgctccagcgggctctgaccatcgcggagatgctgggcatgccgcccgcgagcgcggcgaagacgaacagcgtccagtccggcgcccgatagtgggtgcagatcagcagcagcaacagggcgagtgcgctgagcccggtagcgtagggcagcacgcgactttggccgtagcggtccgccgcgcgtgcgatttgcggcgcgagcagcgccatggaaaaggcgaatgtcgccgccaccgcacccgccagccaataggagccgtgtacctgcgaaagcatggtgatgatgccgataccggtcattgagatcggcaggcgcgcgatcaacccggcagaggaaaacgccttgctgcccggtgcgctgaacagtgtgaaataaggatttgccatgaatagggctcctgaatgttggcggctcggtattcgcgcaatgcccatcattgacatacgccacgtatgttacgttaattgacatacatggcgtatgtcaattataacgtcatcaatggcgagacgggagtgaatccatggcacgtaaagcgcgcacagaaatgattgaagaaacccggcgtaagctggtggcggccgcccgtcagcagttcggtggcgtggggtatgccgagacggtgatggatgagcttactgcgcaagccggtatgacgcgcggtgcgctctatcaccattttggcgacaagaagggattgtttttggccgtcgtgcaggaaatcgacgccgaaatggatgcgcgcctggccgacattaccgcgagcacgccagatgactgggaggccttcgcggggcgttgccgcggttatctgatcatgatgacggagccgcaatcgcagcgcattctgttgcgcgattcgccctcggtgctgggagccgactatctgcaggccagcaaactgggttgcatcacctggatgacgggggccttacaggcgttgatggcgcagcggcgtatcgctaccgccgaaccggaagcgctggcgcatttaatcaatggcggcctgatggatgctgcgctgtgggtcgcccatcagccggaaaaagacgtggcgctggagcaggccttggccagtttgaacctgttgttgaacgggctgcgctccacctctgcttaagttttactggcggccgccgcgccgtttcggcggcggcttaagggtgaatgacgacgggctggacgttttgcgccagctggatattgttgcggccgctgtgtttcgccagatagagcgcggcgtcggctgcgcctatcgccgattcgatgtccagtttttccagcgcggagatgccggcgctaagcgtcagcgtgccgctgtgctgcgggctggcgccgtgcgggatgttcagttccgccacgcgttggcgcacccgctcggccagctgcgccgcgtagccttcgtgcacgttggtcagcagcaccaaaaactcttccccgccgtaacgcaccacgatatcgcgcgaacgcaccgcatcgcggatggcgaccgccacctgcaccaaagcccgatcgcccatggcgtggccgtagctgtcgttgtagaccttgaagtggtcgatatccagcaatagcacgtaatggtggccggtttgcggttccagcagcatagtgatcttattctccagaccacgtcggttataaaggccggtcaggggatcgagcatgctcaaattattgaatttgtcccgctcgttatacaggttggccaccagcgcgtgggtaaagatttcactgcgtttcaacatcaggtggtgaatggagaaagcgataataggtaatagcgtggtgaataatatccgcagggtattatgcatgccgtctagagccaggatcatcattgcggaaggtacggcgtgtaaacaaaaggcggtaaagttatccgtcagagaaatagcgctgataaaaaagatgctaaacaaactaattaataaaaaatcttggttattcggtaggcaatattgacttttaacgtaaatatgtgcggcccagagcaggccgagtacgctggcgaacaggttgagtttgcacaaatatttacgtggcgtttgcagggaaaatagcgccgctaccagacaaaatagcggtatacataataaaggtagggtaaatgcgggcgtatccctaaaagggaacaataatgtaaatacggaagaggcggcattcattaccaaaaaaagaaataatgccaggcgctgcttgctgttcagtaattcctgataagaacgggcgttcatacggaggtcactctttgcaaagtcgttctgtcgaataattaaggttgagaagcattcctttggcgcgaatatccacttgaattgcatggttgaggattgtgattattatcatgcaaacaggactaggaattttcttatgtcaaattatcattttttcctgctggtgtcatctgagtttggtcagcgcagtgaaaatgatgcagcggccaaaaaagtgttatatgatattggttatcattatcacttaaggaggggtgtcatgctcactgccatgattgccgcgtgcgggctgtggggcgtcagttggtgcctcggggatcgcctggccagcgcctggggcgttttgctaccttgtgcgttgatgccgctgctggccttgatcaacctggatatgctgcagttgcgcaccctgatcgtgatagcgatgttggccacgctggtgatgctgttcaacagccggctgcgccactatctgctgttgccttcctgcatggcgctggcgggcggcctggcggcagtcagcctcaacttcagctttgggtgaaacgccagaaacggcaaaaccacgcttaagcgtgtttatcatcaatgcgttgggattttttcgaaggaactactggagagatcatcaattggtgcgaagagagggacttgaaccctcacgtccgtaaggacactaacacctgaagctagcgcgtctaccaattccgccaccttcgcatcgatgctgagtgcaatataaatcatgtggttattggtgcgaagagagggacttgaaccctcacgtccgtaaggacactaacacctgaagctagcgcgtctaccaattccgccaccttcgcacagtcgatgttgttgctttgatttatattacgtcgccagcttggtgcgaagagagggacttgaaccctcacgtccgtaagaacactaacacctgaagctagcgcgtctaccaattccgccaccttcgcgtaccagaaacattaccggagtaacgttaccacggaggcgaattctagagattttggcgggcacgtcaacagttatttccccgctttgcgggcgtttgctggaaaaacagccatatcgccgcttttctgctggtcaaacagccaaatcagccaatcaatcaacaccctgacccgcggcgccaggaaacggccgggcggatacatgatgtaaatcggcattggcggaggcggcgtgtccgccaacacctccaccagctctccctgtttcagccagggcgccagcgaatagcgcgccgcctgaatcaagcccatgccggcgcgtgcgccggcgatgtaggcgtcggcgccgctgacgctgagccgggcgggcagctcgcgcagttccagcttgccgccgcggcagaattccagcgggtaatcgcggttgctggccagtgaaaaataccccaccgcgcgatgcggctccaggctatcgatgtcaagcggcgtgccgtgggcctgcagataagcgggggaggcgcaggtgacctgcggcagctgggcgatgcgccgcgccgccaggccgtcgtcttcggtttcccaggcgcgcagcacgcagtccacgccttcgcgcaacagatcgacgtgggtgtcgttggcgcccagcgccagcgtgatgtcgggataccgccgataaaagtcgtccagcgccggaatcaccacctcgcgcgccagcgaatggggcatatcgatgcgcaccttgccggacggctgcagcttatgctggctgaacaacgtgtccgcctcttccagcgcccccagcagctgtacgcagcgctggtaatagaggctgccttcgctggtcacctgcacctggcgggtggtgcggatcagcaggcgcacgcccagccgctgttccagccgtttcagcgcgttgctgaccgtggcgcgcggcagctgcaggcgttcggccgcccggctgaagctacccagttcgacgatgcgggtaaaaatgcgcatggcttgaacctgatccatgtccactccggattgttggtgatttttgaacagtgatgtgcaatctgcattatttatctttgtcgcgtaaacaaccagactttgctgcgttatccattcaccgcatgagggcagcacaatgcaacaacgtaaactcggttccaacggtcccgtcgtctccgccctggggctggggtgcatgggcatgagcgacttctattccaccggcgccgatcggcaggaggccatcgccacgctgcaccgggcgctggagttgggcgtcacgctgctcgacaccgccgacatgtacgggccgcacaccaacgaagagctggtgggggaggcgatcaggggcaagcggcaacaggtgttcctggccaccaagttcggcatcctgcgcgatccggcggatccttcggcgcgcggcgtcagcagccggcccgagtatatccggcgctccgtcgaggggagcctgcggcgcttgggcgtggaggagatcgatctctattatcggcaccactccctcttcctgtaacgtccgcaatcatctaaaaacatattaaataacaattcattgattgggttttgtgtccgtgactgtccggctctgtcctgtggaatccaatatcaggtgtgtgtagaattacgtgtaccttagttcgatcttgaattcctatacacatgcgacttaataacttacaaatccggaatgctaaacccacccctaaaccttacacgctgagtgatggattaggcttgtcccttctgattgagcccaacggcagtaaaagctggcgctttcgttaccgtttttccggtaagcccaagatgatttcacttggtgtttatcctgccgtttcgttggccgatgctcggtcaaaacgcgatgaggccagaaaacaggttgccgaggggcagaaccccagcgcactccgtaaagagaaaaagctggcgcagttatacggggatacgaatacctttgaagcgatcgcgaaagagtggcaccggtcaaaattggcgacatggtcggcgggttatgctgcggaggtcatgcgtgccttctgcctcgatatttttccctctctgggacaacgttctatatcgacgataaagccacttgaactgcttactgtgctgcgcaagattgaagcgcgtggagcgctggataaaatgcgcaaggtcaggcagcgctgcggtgaggtttttcgctatgccatcgcgacggggcgtgctgaatacaatccggccgccgatctttccagtgtgttacctggacccaataccacccattatcctttcttgactgtcgatgaactccccgatttcttgacggcccttgaagggtactctggcagcttgttagggaagttggcgacgaagctactgatgttaaccggagtcaggggcgccgagctgcgcatggcgcagtggcaggagattgatctggataatgcgctttgggagatcccttcggcgcgcatgaagatgcggcgtgctcatcttgtgccgttgtcgacgcaggcggtagccatcctgaacgagctaaaagcctataccggccattatcgcttcgttttccctggacgggcggacgtgaataagccgatgagcgatgcgtgtatcaaccagctcctcaaacgtattggctatcatggtcgtctcaccggccacggcttcaggcacatgatgtccaccattttacatgagcaggacttcaatagcgcctggatagagatgcagctcgcccacgtagacaagaacgccattcgtggcacttacaaccatgcccagtaccttgagaagcgtcgtgacatgttgcagtggtacgccgattttatcgcgagccttgctcgccagtctcaccgccaataaatcgctaaaacccccctggcgcgcaatgctacccccgcctcgcctgcgcgctttctgtgtcgcttttcatgcacccgcatgagaggccgcaggccgcgccagtacgggggcggcgggggataaaacacgcatcttcccgcatgcaaaatcatgcaccctatgcatgcacgcacaatttgacaccggctagccagaaaaaaagccctttttgatgaaggggatgggatgttttgcgtctggcgttgccgggcgtcaccgcaatccggtggccgaaggttgtttctgacgcgggggagatgtgctgcgcgctgacgataatcacatcagagtgtttttagttttattactcactcttcatactattcaccaaaataaaaaagtatagacaaatcagcaggtagcggggtgaagggtgtcacttgtatccattcacccggtgttcacgtctgttcaccgggcttccgcgagaccttttccctggcgagccggtgtttggcggtttttccctattaatcaaccgcccattcatcgctcaggcttttcggccgatttgccaacaacggtcaataaatgccaataaaggccaatatcggccaacgttgtccacttgattgaaaaacaatcataaaatctgttccaccacacaacaacgccttgttgccaccccggtaaaacttcacataatagggcgctaccgaagttcacacagtcccggccagcgttggccggacaccaagaggtagcgtttttatgttgaccgtttccacccccaccccatccaccccgtcgccggttattcctggcggttacaccccgcgcgagcgctttatccgcctgccggaagtgctttacaccactggcctgtcccgctccaccgtgtacgagatgatgagccgcaggcagtttccggtacaagtttccctcggcggtaaaaatgtcgcctggctggcctccgaggtcgagcagtggatggacgaacgtatcgccaaccgtcaccaggggagcgctgagtgatgcagttaaccctcggtcgacactgttttaccctgagcggcaacgacgctttgtttgtggccgaagccatcttgttgcagcgtaagcacccggatatcgtcttgcctgaacatcgcagtgaaaaacacggtgtgatttgcctgacgaaccggcaggcagagttgcgtcgtatctgtgctgatgaagatggctataatgcgatcgattgaacgtccgggggcgtcttacggcttgccctcctgtccgaccttgcgctatagtcttcccgctgccgcaaaatcggcagccgggcgtgagaacccgtgtttaactatggcgacacaacacgcgccacgcgtgttttttatgtcgcagccttagtgcgctcattttttgcgcggtggatgttatgctaccgcagcagtcaatcaatggtggctcaggcggggcagccttcgggctggccggtttacatagttaccggtttctcacccccgtctgggctaccacccttgcgtgagaacttcggtggtagctgttatcagctaactatggaggctgccgttatggcgacgaccctcaccccgactcacccgacattctgctttttgtttgcggccgtgcgccgttttgcgctgacggcgtcaccgcgcatcgtacgtaccgtggcggatagcgaacgcaacgcccgccgcctgctggcccgtgattacgtgttgtcctttgccggtcgtctgccggttaaggcggcagcatgaacaccctggccgaccgttattaccgcgacacccattaccctatcccgcacgccgattttctgcgtctccagcatgcgcacgccaccggcgtgctgttcctcgacctgctggacaccctcgacctcggcgggcagcgccccgacgccgtgcaacaagcatcgtttgcctcggtcattgccctgctgaccgaccagctcggccacgtcgtcaacacctgtgaatcccaaatccttgcccgcatggaggccaccgccgcatgaacactgcatcctgtttaccgattgaagtccgtaccgccgttttccgccgcgccgtggcgcaggcctacctggatacctgtgccttttaccgggtgagcctcgggtacacgctggacgagctgcagatgacgattgccctgcgtctggaagggcattttgtgcgtcagtacggcgcagaggacggcatggacatggcgtgcacgatgctgagcgacatggtgcagccggacgttctggtagctgtgccgcgcctgaccgcgctggggcaaaagatgatggacgaactgtgctgcgagcgcctgtcggcggcacagaacgccaccgtacactgaggagaagagcatgagcgcccagttcgtttcccagaccgtacgcaccgccaccggccactggccggtgatactcccggccctcggcattgccttgcagccgaacggcaagccgcagccgtgtccaacctgtggcggtaaagaccgtttccgtttcgacaaccaggacgggcgcggcacttggttctgcaatcagtgcggggccggtgacggcctcaacctggtggaaaaagccctgtcgctgtcagcaaaggctgctgccgaacaggtggccgccgtgatggggagtaacaccaacgctctgtcaccggccgctgagaccgctcattcaccacaagacaaagccaaggcccagcacaaggccgcgcgacaggcacaggctctggtggccgccgctcaatgcaaaagcggcaacgcctacctgagcgccaagggctggccggaggtggacaccctgaccttgcagggccagtcgctgcgcgtcggcggtatcaccttccagcccggcgaactcttgctgccgctgtacaatgccgggggagaagtggttaacgtgcagctgattaacgccgccggtgacaagcgcatgctggcaggcgggcaggtgaaagccgcctgccacattctgaacggcccggacaacgcggttatctggctcaccgaaggctacgccaccggcctcaccgtgcaccgcctgaccggtgagacggtgtgcgtggcgctcagcgccaataacctgacggccgtggcgcagcaactgcgcagccactacccggatgcacggctgctgctggcggccgataatgaccgcagcggcaccgggcagacccgcgccgccgaggcggccacacgcaccggcggtatcccggcgttgccgcccacggagggcgactggaacgatatttactgccagcaaggcgctgaggtcacgcgcgcaaagctccaggcgctcagccagccgccgcagccgagcccgtttgacacgctgagtgatgcagacctcaaagccatgagcgccagcgagaaagccgagttgctggccgaacactacggcaataccctggcggtgccgccggtgggggaagagctgtgccgctatacgcgcggcgcctggcaggtgctgccacaccggcaactgagccgggagattgccgcgctgttccagaaggtgcgtgcgccgttctccgctgcgggtatcaacagcatcctggataccctcaagctgatggtgccgcagatgggcgacccggcccgccggttgataggctttcgtaacggggtgtttgataccgttagcgggcagttcagcgcccaccggcaagagcactggctgcgcacggtcaacagcgtggactacacgccgccgcgcgccggggagaacctggccgaccatgcgccgcacttctggcagtggctgacgcgggccgccgggggcaatcacgacaagcaggagcgcattctcgcggcgctctttatggtgctggccaaccgctacgactggcagctgttccttgaagtgaccggcccgggcggcagcggcaagagcgtgatggcggccattgcccggctgttggcaggagccgacaacaccacctccgcgaccatcgacaacctggagtcggcgcgcgagcgtgccagcgtggtcggcttctcgctgataattctgcctgaccaggagaagtggagcggtgacggcgcgggcatcaaggccatcaccggcggtgatgcggtcgccatcgacccaaaataccgcgacgcctacgccgcccacatcccggcggtgattttggcggtgaacaacaacccgatgcagttcagcgaccgcagcggcggcgtctcccggcggcgggtgatactcaccttcccggagacgataccgctggccgagcgcgacccgttgctgctggacaaaatcacccaggagctggcggtgattgtgcgtcacctgatgcagcgcttcgccgacccgaacgaggcccgcaccctgctccaggcacagcaaagctcggacgaggcactgaccatcaaacgccaggccgacccgctggtcgatttttgtggttacctgacggtgctgggcaccccggaaggcatgatgatcggtaatgccaacatcaccccgccgaatccacgccgctacctgtatcacgcctacctgtcgtttatggccgcacggggctatcagcacgtgatgaacctgacggcgttcggtttggcggtgccgcagacgttgaaagagtatgagcatacgctgctcaaacgccgcaccaagctgggtatccagaccaacctgcggctgaatgatgactgtgacgtcgactggctgccaaaatgcgaggcgtaacaggcccaatgcacccagacgatcggccgcgccgatcaatggtgtcgtattgatctgcgtaacccattggacggtcacgcatcacgcaacctatagtgaggaggaataaacgttccgccacaccagggcattcattcgggcagcgtctggctgccatcctcataacgacaagcgctccccccccaaccggcttcggccggttttttcattttggctcgatgttgatacttcactgacgggtcagccagggggaagaggccgtgccgaaaccccctctgtgacacaggggtttttcacggatctttttcgaaacaaaggcacgtttagcaactgacggccccacggttcagacttatcctttcgcgttttctttctttatggttgaaaatatcgtcgtttttggggttttattattttttatcgcgaggtggcatgagccagcggaagtatttgacgcagtccgaagtggagcgtttgttgcaacaggctttggcagggggaaatgccgagcgcgattattgcttgatttacatgagttttatccacggtttccgcgtcagcgaggcgtgcaaactgcgcctgtccgatttggatttgcgggggcgctgtctgtatatccggcgaataaaaaacgggttttccaccaaccatccattgctgaaggacgagttgcgggccatcaaggcctggctggtggtacggcggcgtttgccgggcgctgacagcgactggttgttcctgtcgcgtcaggggaacccgctgacgcgacagcgtgtgtaccaaatcatcagtcagttgggcaaggaggccgatatctccgtggagtcacacccacacatgctgcgccatgcctgtggatttgcgttggctgaccggggcattgatacgcgattgatacaagactacctggggcataagaatattcggcataccgtgcggtacacagcgagtaatgcagaacggttcgaaggggtatggcatcgcccaaaaaataagcgaaaaagtagacagttaggaccaaactgtaaagtagtatatgtaaatcgttaaaaaaaaccacaacccttcaagaaaaaagttcaataaatttactatctgtttgtaatttaatataaaaaacttttcaatgcggccttttgggagccgttctctgcattccttaccgcgcttcccgctccttccgtcaggcgacgataaagcgacgagtggatcgccgccccgccaaaatgttctttaatgccgacaaaggcatttattttagccaatccctcctaaatatctctttaaggcagtcactttccccacagttgtcaaaatggtcctaaatgtaaagttcggtgtgcaaagattgctcgttttgcaggtcttaacggggcccgcctggggtgtctgaaaacgttcatggcaggaatgtttttcagtgcgcttttaatattccttgaatagagcggccacggttcgttgacctgtttgaaatggagtttgaagctggcgaatatttttcgatgaagatgtgatgatgtgcaattaaggggatttgtctgttttaggtttctgatattgacggtacttaaatctgaaaaattacgctttggctgtgtttcacaaatgtgcggtcggtgttttttgttgtcgtaaattgaaattaaatggaatttgattggctgccgcttcctttatcttatgggggttgaacgtggcggtcattcagatgaagaagcagtttgtaaataaaaaatggtgttttttactcacgcaggaaatcaatgttatgaaaacttctatctctaaattggctgtggttgcggtattgggtctgacttctctgggggcgtcagcagcaggtaactccggtaaggtcaccttcagcggtgaagtggtggatgcgccatgcaacctggcaccaggccaggatgggaccgatatcaaggtgccatttggtcagctgtccatgtcccaactgaatgccggccatgtggccgcgcagaagttcgatattcagctccaggactgtgatttggctggcaagacggcacagatcacctttaccggtacgacgctgtcaggcagtaccaccttgctggaaacccagggcggtgcgacgggtctgggtatcggtctgtcaggtatcacctttggtactgccaagccgttgacgggtctgaaagacactggcaataacacgctgacctataccgcgacggcgcagcgtgctgttgctggtaccgacgtgactgccggtgattttgctgccatcaccaacttccagatttcctaccagtaatcgctgcgcgtacccccggcagtcctgccggggggaattcgggacgagggggaagggaagatgaaaagatggctgtatatgtggatgtcgctgtttttctctctgccggtattggcagaaacctattcaagtttagatccgtttcgtggcaaggccacgatgagtggcgaggtcctggcaacgggctgctccatcgccttgcctgaccgttatcagacggtttccctgggtgagcagccgatacgttcgctggggcaggcaaaggggggtcaggtcaaggcctttcatatccgtctggacaattgtgcgccgtcaggctcggttgataaacgcaaggacattgatccggccgtacgtatccgctttgacggcctgcgaggggaaaacgcggcctggtttcaaccggcgggctccagtcgcggtatggcgctggtgttgagggatgagcgtaatgaggtgctctatccaggggaatattcactggctatttttgaccgtagccacaatcaacaaatgctgaatttcacgctggagtgggtgcctgatggtaatccacctcgtgcgggggattattacgctgcactgcgtttcaatgtggattatgaatgacgtgggaaatatatcgatgtcgatggtgcaagtcatgattattttcttcttgggtcggtacgtaatcaatattgaataattgcgcgagctgaaactgcgcgggtggatggtggcagggcggttaatgccgggttatgaaatgcattctggtggcggattatgaatcagcgtgaattacgtttaaataaaataacgattttaatcagtcttgttatcctcttttctggtcgtgcgtctgccgtggaatttaatactgacgtactggacacggatgacaagaagaatatcgatttttcccggttttcccgtgaagggtatatccttcccgggacgtatcagatgcaggtgaaactgaacggcgacagtctgggtaatgatattgccgtgccgttttatgtgcgtccagggcaaacgtcttcgacggataagtccgaagcgatgccggaagcctgtttatcgccaatctggctcgacaagctggggttgacggaagaggccctgaaaaaagtggggacctggcatcagggcgggtgtgcggatttcacggcactgaaaggcactgagttaaaagccgatattggcagcaacatcctcaatatcaacatgccgcaggcatggttggagtattcggacgcgtcctggttgcctccgtcacgctgggataacggtattccgggcatattgctggattacaacgccaacggcaacgtaacgaaaacccgcggtagcgatcagcaacaaaacgcggctgtcagtggcacggtgggcgggaatgctggtgcatggcgtttgcgggcggattatcagggcagttatgccaacaccacgggccagaacggttcatcgcaacacacattcgattttacacgggtgtatctgtatcggccactgccttctttgcaggcgaaattgacgctgggtgaagattacgtgagctccaacatcttcgattcctggcgctataccggtgccagcctggccagcgacgacaacatgctgccaccgaagctgcgagggtatgcgccggaaatcatcggcgtggccaagaccaatgcccgggtgacggtcacgcagcaggggcgcgtggtgtacgacagcaccgtgccggccggtccgttccgtattcagaacctggacagcgccgttcgcgggcagttggatgtaaaagtgaccgagcagaacggcgacgtgcagaccttcagcgtgtccacggcgtctgtaccgtacctgacgcgacccggccaggtgcgttatcagctggtcaccggccggccgagtacctgggggcatgatattgaagggcccgtgtttgccaatggtgaggcgtcatgggggatttccaacagctggtcgctgtatggcggcagtacgctgtcggatgattaccaggcgctggcgctgggggtcgggcgcgacctgtttgcgttcggtacggtggccctggatgtcacgcagtctctcgcgaaattccccgaccaggataaccgtcagggcaaatcctggcgcgtcagttattccaagcgttttgacgaggccaatactgatgtgaccttcgcgggttatcgcttctccgagcgcgactatctgagtatgcagcagtacctggatgtgcgttatcacgataatgacagcggccagcaaaaagagcggtaccaaatcagcctcaacaagcgctttgacgaactgtcgttgccgttatctctggggctcaactaccagtaccagacctattgggaccagggaaacaccagtcagtacggcgtgaatctggggacctggtttgacttgccttccctgggggcgcgcaatgtgtcgctgacgttgacggcgaaccgcaatcagtatctggggcgtgaagacaacgtcttcaacctgatgttgtcggtgccgttcggcaccgggacggccagctacagcagtacgtacagtgatgaccggtttggtcagcgcgtggggtactacggccgcgtcaatcagctcgacagctacaacctgaatgccggcctggcgcaggatagcggccaatcgtcgcgcagtgaattcaatggcatgtatacccataacggcccgcgtgcggtggtcaatgccaatgtggccgtggccgagcgcagttattcctcgtttggcatgagtgccaacggcggtctgacgctgactgctcaaggggcggcactgcatgccggtggttataacggcagtacgcgtctgatggtggataccgatggggtcagcggcgtgccgattgatggcgggcgtgtggtgaccaatgactggggggtcggcgtgctgaccaatgtgaacagttactaccgtacgaccgcccgggttgatgtcaacaagatggcggacgatgtggaagcaacgcagggggtggttgagaccgcgttgacggaaggggccattggttatcgccgcttcgaagtactgaagggtgagcgcctgtttgcggtgctgcggttggcggacggcacatacccgccgtttggtgccagcgtccgtgatgccaagggaagggaactggggcttgtggcagacagtggtctggcttggctcagtggtgtgacgcctgacgctgcgctcgatgtggcatgggacggtcgcagtcgttgccaggtgcaggtgcctgcacaattgaacagtcagcagcagttgctgctgccgtgcacggcggtaaaaccgtaatgaagaggggcggttgccgccgcccccgaacaagaagacagggcaagagcatgatgaaaatgaaaaaagtgacgtgggcgttggtgggaatattggcggcgatcacgccggcgacgcaggccgctgtggccctggaccggacccgcgcggtctttaacggggacggtaagtccatcagcctgaatatcagcaacgacaacaaacaattgccttatctggcgcaggcctggctggaagatgcaaagcagcagaaggtgacgcagggggcgttggtggtgacgccgccggtacagcggctggagccaggcgcgaagagcatgctgcgtgtgtcggctacgccggcggcggcgcagctgccgcaggacagggagacgctgttttacttcaatctgcgagaaatcccgccgcgcagtgacaagcccaatgtgctgcagattgcgctacagaccaaaatcaagctgttctatcggccgaaggccattgtagcagcgccgggcacggtgtggcaggaccagttggtgttgcacgaagaagggaatggttaccgcatcgagaaccccacaccgtactacatcaccgtcatcgggatcgggaatacgccgaagcaatctgaaagtggggcgtttgaggtggtgatggtggcgccgaaaagcagcgcgcaggtgaaaagcgcacgttacgccacgccttacctgacttatatcaacgattacggcggtcgccctgttctgacgttcacctgtaccggtgggcgttgcagcgcgaagaaggcgtgaccaaaagtcagtgacgaggagaggcttatatgggcagaaaataccgaatgagtacgctgttgtgcctggtgttggcgggcggtgcctacgccgaagtgaatacgccgcgcgtgccggattacacgctgccgcatgagcccacgccaccgggagaggtgctgtcgcgtgaaggtgtgttgtgggtcgagggggccatgctgtcgtcgccgtgcacctcgggcagcgtgatggcgggcagtctgcaagacggcgtggtgaaaacgcagctgcagtcggtggtcgtgctgctggaagggtgtggcgatggcgtaaacgggagtggggcgcgattgccggtgaccgttgacgtcactgcgggagagtcgttgcaggtgaaacaaccccatccctatcgcctggcacacgggaatagcatgctgcctgtgacggttctgccgggtacgcaggtactgcgtgtggagatgaattatgaataagcaaggatgttggctggcactggcactggcgctgctcggtgctgtggtggggaccggcccggtgtcggcggtcgacctgaatttttcgggaaccctgatagacaagcagtgcacgttcgctcagggggatgacccgctggaagtggacatgctgtcacgggcagtgtcgttctttcatcggtatccgcgtacggaaaccgtgccgtttgacatcgtgctgaagaattgcaccggtgccacgcaggacaagctggtgatgatgaccttcagcgggacgcagaccgaggcggttggtggggtgacgctgctgaaaacggatgggggtaccggcatccttatcggactggaaggtgcgtcggggcaggccatttcggtaggcagtccggtcaatgccggcaccattacgcaaacgggcgcggcgggtgaaaaccggttccggtttggggcttacgctcaggggccggcggacctgtcgacgctggcggaaggggcgtacaccgcgacaaccacctttgaggtgacctatcagtgagtcacggagagagggaatgagagtcattgtgatggtgttctcgatgatagtgggggccgtgctggttgggttgttgttgatggcgacactgtttctttcgggggcggcacatgcgtcggagaacgtgccggcactgttgcgctacgcccagcagtacgatgggggtaataggggagtactttcctcgcctgccaatcaatcgcaccaggctgtgcaggagctgcagcatcgacagcttacagcccgcgtaaaggcgctgactgcgcaactggccgagaaagacaagcagttggcggctttgcgcgacaagcagcaggtttcaggtgacgaggcgcaggggctggtgaagatgctgacgacccaactagcggacaaagacgccttgttgaccgcaatacaggagaagcaacaggttgccttgacgacggaggctgcccgggtgagggcgctgaccacggagctggcagaaaaggataagcggctggatgacctggcgaaacaactgcctgccccggtgaacctggactcggcagcggcccgtgaggcctatgccacgggcgtgctgtttgggcgagacgtgcagacggcccgggacgccaatcagcaaatgggcctgaaactggacgataccttgctgctggccgggctgacggatgcactgaccggtaaacccaagatggaggaaggggcactggcgatggcgcaggaggacgcgcgcaaggcagcggagaaagcactggtctcgaccgtggcaacgcagagaaaggcggatgcggcctgggtagggcgtttcgcgaaacagaaaggggtcgtgaaggcgcctgaaggctattggtatcgggtggagcatgaaggcgatggtatgcgcctgaatgcgaatgacacggtagctctggtggtgacggaaacgctggcggacggcacggtggtgagcgacatggaaggcgcagggggctcgttgatggatacggtatcggctttgcctccggcgtttgcgggggcgctaggtgccctgaagaaccacggttcactgaccctggtggtgccgcccgagctggcctatggcgacaagggatatcccccgaaagtgccgccaggcgcgacgatggtctacaagctgcgggtggcggatgtgattgcggcacccgatgagaagaagaggaaaccgtgatgagacgaccgatatttttgctggctgcgttgctgtggtgcggccaaaccctggcagatgcgactattacgataaaggggaccattctggagccggtgtgtacggtgacgggtgaggatgacggcagcgcggtggatatcagttttggggaagtgagcttggatacggtggggagtgcggcggccgagcaacccatcaatctgaaagtgagttgtgacaacccggccccgacggggaaagcgttgaagatgtatgtgcacccgaccagcaatggcaagctgacggcggtgggggccaatgttctggggacatcccagagcaatctgggcattgccttgaccgccggcactgacggtacgacgccggtggatctggacacgtggatccccgtggtgggtgtcaatacggatgtggatgagccggtcggacaggtgacgttgaaagcgcgcctggtgacaccgtctgcgggttcattgcaggcgggaacatttactgcggcggcgaatctggtaatgagttaccagtaggaccacgactgcagtacgagatgaacaatgactagcccttccatgagggaaagcagaacgaggcgttatgaataacaacgtatggaagatggccgtattgatactggcaccctggctggccgggtgcagccaaacggctagtgagatgccggcgtcgctggttacgccgatggcgagtgaacagaagcctgttgaaatcgctgaccccctcccggtgccggtggctgaaatagtcccggccaatggagagggcgatgccgaagcgcgcatgcgtcactgcaatggcgagttgcaggtgctccgcaaggtggataacaagcgttatgcagaacggaaagtggagtttgaccgattgatgtcgggtgcggcgatgtatgcgggtgtgcgtgggagcgtgcagtcccggacgcaagacgcggtggatgcgctgtatcgctaccggacggatcggctgtgcgcggatatcgggcaggatgtgctgaatgggctggtgaaagctgggcgaggtttatgagtcttgaggaattgcgggaaggggcttatatgaatagcaaagtatggaagatagtcgcaatgatactggtaccttgaatggtccaaatttacttaatagcaccctttgaggttagatttatgggggtgaatatatggtggataaagtatgagattattgttaatggttgttttgttgttgcagtattcagattgttggtcagagtcatgggttcaggttacttcaacgacgaaaattcccggctcaagtttatatgatttttcttacgattattcatggccctatgaaagcagtgatgctgttgtggatttgtgtcggacggggtgtattgttcatcccttctatgtaggcggtcagatttacgttgaacaaggcctagctataaaggcgagtgacaattgctataatatgaaatgcattcgggataaatgggtggcgaaatatggtgttggtggtgccggacatttgagtacttcacaagcaggggcaagaacttcatgctggtcctatgtggcctttccattctcgggagcatatcccacaggcgctgctatttcgcttcccggagcatcttgtgggattgctccgcctccaggtgtggagtgtaatatatcgttacaggacattgaccatggtgtattgaaaccttcggctataaatggttctacaaagagtgaaacaggacaattgatatgtaatgctgatgttacagcgaagctaaccttggggtctggagatagtgttcgcttgtattccaatggggtcaatattatagactctgaactttacattaatgatgttaaagtaggtggtgataaatcggtgacaattactgcaactaatggcattaccccaataattataaaaagtgtgctgcatagtgtgtcttcacctatggggggggaatttagtggtagtgatgtgattttaatgtcaatatattagttgaggttggtttgagagggggcaggatcgcaacactgacgtttacttacgaatgagttaattaatggtgtctgtaatgtcttatttgataagaaatgacgctttttttatggtttttcctcgatgtcaatgtaggtagttatgctttggtcttttatttctattaaaaagtcgtttaagcttgtggcgttaattgttgttggcgttgttgggttttattcgcctttctcgttttcttactattttgttcaggagtcgagaaacaatctgcacgattggaatcttccatccaatcgtgtggagctagcacccggggaaggagggaaaaatctatcaattcaattggatgttaggggcgacttttatagttacaaagaatacgtcacttgtgttgctgggtgcagtgatggtacgcgttattcaactccttatatcgaaaatgatccatggagaatgggggttgctatgattgcaccgtttaccattacagctagcggaggtgggcgctcagccacgttcaacattaatggcgtatcatcgggtgggcgtaattatattgggagtggcggcagtgctggtgacgtcaggggtatgtattttaccgatggcgttgcttatcactccagcccctggatcggctcatttcagacctcggtagatgcgacttacatatggcataacgaaacttacggcgggaatattaacttgagtgctcccgcaggaacgccagccggaacctatacctataacggtacattggctcaatttaatcttcagtattgtggtacgtcgtgcagtccatcatttagccagggcacatattggcaccctttcaacacaaccgtgtatatcacggtgctgggtaaatgtgcattctctaacgcctcaatgatgcttgattactcaagtttaagtcctaaggcagcgaatgggagcgagaaaaaatcgacgactcaactgacgtgtaattccgatgtgagctccggtacgcttaaattggtctccacgtctggcagtaatcaaacctcaacgacgggtacttccgttaaagtcggggataatatggatgctattgtcaccgttaatgggaaggacgcatcgggtggtattgcacttcaggggccgttcaatattcctatcgaagtggcgtcgacactcaatacgtatggcaatatacctaagcccggggcatttcagggaagtgcagttttgagttttgaacctgattaaaattggttggttttttgtgtggctttccctttgtcaaaatttgttttggtgtcttcgctgcttttattgctcggtaatgcgtctttctttttctgaaaattgagcctggatttttagggattaaatcatttaatgagagggtctggatatgtcacgggaaaatgccaataaagaaaacatgggcgcccaattcactgctggagaaaagaaacgtattgccccccgtcaatccaatcatgaagaatatacgttacccgactgcctgacaaaatatcccccgatgccactgtatttggcggtggcgcactttggactgttgacgcaacaaatattatcgagagaggtgatttgccaggcctttcatattgacacgcgccgggcattggaagtcatgcgatatctcgtcaatggcgcaccgcgcgtcacctgcgaatgcctctcactgatacagcgacgggggtattgtctgcgcgtgctgagtattgcgtcagttgagtcggccgccgaaaacgcgtcatcaccctcctctcgcacgcctgcccgcaagcggggaagcacgcttgagcgggagcgcgcgcagcatcaggtacgccagtggtttctgcgccggcccaatccctgattggagacttggtagcgcaatatgtgggtcaacaggagaggtgagatggaagacgcgacgatgggagcgtgggtatggatgtgggtgctgtggctgagtctcagcgcgttgctgttgggagggatgctttcattaccaccgaaagaggttattgagcctcgccctgtcaggcgtccgccttgtctgtggcgttttgtgcgcggcgatatggcggtgggcggtaccgtgcgtatcggtctgagtttggggggcgctggatggtggtgcggtgcggccggcctgttggtgtcggacctatctcgcagcctgttggtggtcggagcgggcgctctggtgctgatagcgctgttcaatgccgggcggcggggggcgcagtccctcgtgggattggccgttctgtctggttttcagggggcgggatgggtcgtactgctgctgattgtgcttcagctctacgggttgtcggtgcgatgagaaaagagggtcgggacaatggcagtgagcacaggcagtgagtgtttcaggggcaaggttgcaaccgctccccgcggtcgtgtctcggcccctctgtcgatagcggttgttgatgcgtgtcagttcgggcttattgggttgcacagcttgttgacccttcccgcgctttcaccgacagcgatagctgtcagtgctcatgagcaggtagaaagcgcgctggttgctgtacaccctggacaggcatgcatggggtatggcggtggggaacggtgtctggttttgcggctgtcggcgcatccggtacaggccttgcagcagttgttatgtctggaacacggactgatggtgcgagcgggctttcggcgcttgattgttctttcaccgttcggggtcaataacgctgtccggcaggtgctggtctgtggcggggtgcgcctaccggtacgcattgtggatgcacgcagcccggtaatgtggttgcgtcgcgtggtgttgtcgcagggttccttgtcgcaggccggggaggatgaattgttgccccagatgccggcgttgatattgtccgaccccgagcgtcgggttcttgtcaggacattaatggaaatctccattcaccagcaggcgcgattacagcaccgcaacaacaagacgttgtacgcacagcggcacaatgcgttgcgaaaactccgcgcatccggggtggcaggcctgttgcggcgatttgtttcgatgtgaaggcatgaggcgttcagtgatgtggaggtgggtaatgcgaagaaggcagcgagggcggcgacattatgcacttgaacaagcggactattttcgggagcggatattgaaacgcgtggtgttgtgggtgcttttgccacttctggctgcgctgttggtggtgttatggaggacagggtgatgtggaagcgtgcaggggaagagaaaggaggcagtggacagcaaccggagttgcatgtcatgtcgacgcccgtcgagcgtttgcgcgcaacgttgcagaaggcggcggcgttggagcgggcggggtgttttgaagatgcggcagcctgctggctggcggggtttgaattggcccggcaagggaatgagcggcactggtgtgaagtgcgggcgctgctgtgtcaaaagcgaagcgcggaaccacgacgttaatcgtgcggacccgtcagcgtgtgccgcgggcacctcagcaagtgcaaaaaatttcgcctggacagccgtggttatctggctgtttctcggggctatggtggtgatgttttggtctgggcgtggtgtggggcgctggctgtcccggctggggcatggcgtgataagtggattgatgtaggcggcagaatcttcggtaagggggaaagatgcaaagatgtcggcaacggcatgtctatgtccgaaggttgcggatgatggggcgtcgtatggtgtggctgggtgtggtgacgataagcatggtgatatgggggctgttgctcggacttatcgtatggctggagtggtgagacgtggtccttccggcagtgacgccagtaggccagcgcaatcaaagtaataaacagcgcattgaacgacagccagataaacacgatgaccatcactgttcccatgaaatcatttcctcaacgttaaacgggggagtccatcaggtgcgaggcgggctcggtgtgatggtgttcatggagtgacattattatcgggaggattaataagtaaaggtgatgtttttggtgtgttgtggatagtgatagagcgcacgttaattgatgggaaaatacagggtggtgctattttgggcgagttagtgattaaaaaggcatcgctagaaaaggtattcaacgcgaggtggcaaaatgaaatcagtaatattgttaagtttttttgttgttttttcgggggcggtctcgcccatgagttatgcacaagattagggtgcagcgtttcatgtggctgcgggggtggcgacagaaccggcctatgtcgggtcatcgcattatgtcgcgcagccggtctatgacgcagccggcagttatcgcaacgccacatggggcacgtttgagctcggtgttttgcagggtgctcgctggcaattgccgttgtcgtcgccactgggtgtggcgttactgatggcttacgatgccggtcgtgacgagcgcatacgtacgcttggcggccacaatacgcagttgcgcggtatgggggacttagggggagcattggaggccggtgccgagttgagttatcagtttgcgccggcacgggtttatgtcaaggggatgcaggcactgcgttcgcgcgactacggcgatgaggcgcttgggcatacggcctatgtggatctggggggggatggtgagcatgccctcgacgagcaatggacgctgagcagcaagttttacgcgacctgggctaatggcgggtatcaacgcgggtattttggcgtgacgccggcgcaagcggctcgaacggactttgaggcttatcatcccaaatccggcatcaggcaggtgacggcagaagcagcattgaactaccagtggacatccaacgtggcattacaagggggcgtggaagtgtatcggctgaccggtgatgcggtggacagcccattggtggagaagagcctggccggtatggcgtttctgagtgccagttatcaattttaagcgagaaaccacatgtcccgtgcttcgataatggtcgatgccacgggtaacgtaataaggtatggcgttgcaactgacgtcaatgccaaatcccggtggccatttccaataggaggcgtaaatgtcggtgtgatggccaaagactgcttgcgaggtgtgttatgcgtatatttttgggttttatgatggcgggctcaatcctgcttttgtcggcttgtgctgagaaaccgcaggtgaccgccgattacgatcatggcgtcaatttcagtcagtatcacacctacggttttgctgccaaagaagagaagtaccaaacgctgacggatgagtacattcgtctgtctgttgctcaggaaatgcagcgacgaggttatacactcagcgccagtcccgacctcttgatttattggcatgcttctacacagaactaagtgcagatggatgatgagccctctctaattggccgtgtcgggtacgctggctgggcagggtataatcaaagcctatggacgtataccgagggcatgttgacagtggatctggttgacaggaataagcgccaactggtgtggcgcgcgacagccagccatgtcctggatgcggataaggcggtgagtcaggaagatatcgggcaaacggttacggctttattttcggcctatccggttccgggggctgagtaaacgccgttatagcgagggccaaatgctgcgaataaggtttatgtatgtgatgggcattattgtttgtggcgaatgttttccgaaagacaggggtatcattaaaaatatttgactttgcacgcctcccgtgaggaggattaatgcatcccttggggatgatgtgaaatgtgtattccttttgccagacttccctgttggtcaccccacaatatcggggtgacattttttctacttcttcgctgatgctttttgctgtttcaataatgtataaatggaatgggtgaatgaccaaggtaatgataatcggattactgttgttttctgcggtttttattggcctgtgtatttattttcaggataaagagggcaccatgtttgataaattgagtcaacaacgccaatctgtcggcagtggtgtatttactgcgggtgattataaacctgggcttttaaagcatgtcgtgctgtttaaatataaaaagactgtcacgcaagcccagcgggatgcggtgacgagtcggtttttatcgctcaagcgatcaatgcgaccgggggcggatgcgccttatattctctctattgttgaaggtgtgcaaaatagtggggaaggggtggatggcggatttgaacaggggtttatcgtgacgttcaagtctgaaggtgaccgcaattattacgtgggcaaacccctagtagatactgagggggattacgatgaggcccatgacgcgttcaagcaatttgtggcccccctgctcagtgacgataacggcgtgctggtgtttgatttttcactgaggtgatgacgtcggtgatgatggtttcatggagaaaacacgatgaacagaatgataacggtccatacctcgcttgaagatactccctttctttttcaatcattgaccggcaaggaagccttgtcatcgctgtatactttccatgtcgacgtgctttgcgaggctcaacctgtcgaccccaaaaaactgctggggcaaaccctgacggtggagtgtcgccaaaccccgctgaccccaccacgctatttgtcgggcatcatgacgcgggttgaggtcaaggggcgggacaaaaacgaccgctatgaccgctatacccttaccgtcaaacccgccttgtggtatctggggcagggacgggattgccggatatggcaagagaaaagcgtgccggacatcatcaccacactcttgcgtgagcagaatattgcgtttgagaaccgcctgagctgggattaccggtgctgggagtactgcgtgcaatatcaggaaagcgacttcgattttatcagtcgcctgatggagcatgaaggtatctattactacttcctgcacgataacgggaaacacacgctggtgctggctgatgcacccgagcagcacgaggtgctcagtggtttcgccaccttcccgtgtattgacgagacggcgagtgatgtctccgagccggggattgcacactggcgggtgtccgagacgatgtccgcgtcgctgtatctgactgacgactatgattttcgccggccgcgtgccagcctgctgcaggcgagacaaaatcccgcacctgacggccagcaagaggctgtcgtgtttgactggccggggcggtatacccggcatgatgacggggcattttacggtcgaattcgccagcaggagcttgcgtgtgcacaggcacagatgtcgggggaaaccccgtcgctgggcatggcaccagggcatgcctttaccctgacgcgggcggcgcgcccggaagataaccggacctatatcgtcagcggtgcagagtattttttcagtgaggccggttattacagtcaggatgacgaagaggcgacaccggtacatcgcacggtctttaccgcccacccggcggccctgagctggcgtccagcccggcaaactgcctggccgcggacatacggcccgcaaacagcggaggtggtggggccacaggggcagaccatctggaccgatgaatacgggcgcatcaaactcaggttccgttgggaccgccataacgcccccggtaatgaccaggcagcctgctgggtgcgtgtgtccagtgcctgggccggatgggggtatggcagtatccaggtaccccgtgtcggcgaagaggttatcgtcgactttatcaacggtgacccggaccgccccatcgtcaccggccgcgtgtataaccaggacagcatgccgccgtgggatttgccggcggatgcgaccaaaatgggcttcatgacgcgttctgcgggcggaacccccgagaacggcagctttttggtgtttgacgatgcaccggggcgtgagacgtttgacatgcacgccgaacgtgacatgagcatgagcactgaacgtgacctgacggtgaatatcgagggggcacggaccacgcgggtgaagggcaaagacagctacacgttcgatgacagccagcgtgtacgtatcgccagggggcggcaggttgatatcgcggcgggtggtgataaccgagaggtcacgggggacagcacgaccactttgcacggcaagcagacggttatcattgacggcgagttggttgaggaataccgggacgggcaaacaaccacagtcaccgccggtggccagacgctaaagatacacgccggtggccaaacgataatcatcagcgaggggggccggtccattgacatcgtcggggatgcaaaaaaaaagataaccggcaacgagcgcgaggacacgacgggggaatggacgaagtcagtgggtggtaccattaacatcctgtccgatgcggatgtgaacattaaaagcgccacgaaaatcacgatggatgcgcccaatcaaaaggctactaccggcaaggggcacagcgaaagctttaccggtcactctttcagcatgacgggtgcatcggaaagctttaccggcagttcggtcagttttaccaactcatcggtcagttttacggcgtcgagtgtttcgatgggcatgttctccatcagtaacacgccgtttaaattatcaaaacatgataaccatcttgaatttgtcagcggtaataaaacgctcaccagcactcttctctctctcaagagtgattacagtgcgtttgtgagcgccctgacgacgattgcgtgaaggggaatggtgtgggtatggtcaatgttgcgttctggtcaaatgtggcccttaccctggcgctaatgctgctggtcatggtggggatttggaacacttgccgagcggcccgaaaaaatcgggtcattatgaagtatggcaaggaaacccgtgcgctgattgtgaatgccacgccgcataagaggcaggttattgtggggaaagtgtcggtgaaattacaactgacttatacggtagatagggtgggatattatgttctgaaggatgtcattgtatcgccctattatatgaatgcatttaaggtcggagatgaagtgctgattcgctatagcgagagatgtccgggcgatattattatagtaggcgaagtgggtaattagcgttgcagtgttgtgaaattagcggtggaggtttttgtctttttaaaattggcttggtgtggctaggtattaatggtgcttaataaataagcgggcgtgaatattcattggttgtggattgcaatttttttgtgactggcaggtgctgcctgtgtttctataagtgaattgatttatcatggtgcattatagtgccgtggctgaaattgttgaaattattatcttaaatatatcaaataaaacaaaatcccttttcaattcaggcgttgctgctaccttcaataccgaaccaatataagactactcctaaatggtgagggtgtgatgaagcgcaaatatctaacaggggaagaaataacaaggttacttaagactatttccatggatatggtttctgttcgtgattattgtatgacaagcatggcgtttttgcatggcctcagggtcagtgagttgacggcgttacgactggcggattacgaccccttgtccaggaagatttatatcgccagactcaaaggtgggatgagtaccagtcatcccttgctgccggaggagaatgcggccttgcaggtgtggcttgctgaacgacagacgttggcggggcaatgtcagccctggttatttttgtcgcgtaggggcaatcgattgtcacggcaagggttttaccagttactgcggcgttatggtgaacgtgccaatttatcgcttccagttcatcctcatatgctcaggcacgcctgtggatataatctcgcagagcgggggaatgatacgcggttaatacaggattaccttgggcatcgcaatattcgacataccgtgctgtatacggcggcgaatgccgcacgctttaatcatgtctggttgaaagatgcggggttaccgctgatgtcgccattacaggaatcgttgccccgcaatgtgctccacaacaccaattaatcgaaacagcttgttcaaggtattgttaaacgggtgcgaggcttcttgatgaacagggggggggcaggaatgaaaaagaaacaggaagccccttgtgttcaggaggcatcatcaccattgggcgaagcgggcgttatcgtgatgcgggggagtgagcacactcctctttataagcgggtggcgctgtggggctggcgtctgggaaagccttttagtcgtcatgatgtggcgaaaacgtttggaataaatctcgacagtgcaggaaatgtgatgtcttacttgcgccgggcgcgccctgacgtggtgaaaagttggcaatggtatgagcggggagcaagaggttcgcgcaagcgttatatgcagatactttcagcgccaaatgttgacggaaagccggtcaggatgatgccggttcatttgttgggtggaaagaaagagggctctgtgcaggatatgcgtcgccgatttattcgaggggcggccgtaggattgggggaggactgaatgcaggtctgtacatgaggagagtctgttggcatggaaggcttgcgtgttgattcagacctttttttcgcaagagacaatggccctgcatcgaaaggtgtagggcagtgaatggtgactacaggggtgttaatcacttatcgcattgatttaaataaataaaaacatttggtgtagagggtgcatagttttaccttaaatcttttttaaatcggtttagataatgatgggtgagtataattttcaatcatttgtttaaatgagctgttagttcgtgcaagtgtgtatatcggtgtgtgtagatttgttttttattttcattttttcattgattattagttggttagattgattttttttattcctattatcagcaccgggtcgatccgcaagtgccgatcgaagacgtcgtcggcacgatggcggatctgatccgcgaaggcaagatccgtcacatcggcctgagcgaggcgtcggtcgccacgctggagcgggcgcacaaggtacatccgatcaccgcgctgcagaccgagtattcgctgtggacgcgcgacgccgagcagggcgtgctggcggcctgcgagcgcctgggcatcggctttgtgccctacagcccgttagggcgcggtttcctcaccggcgctatccggcggccggaggatctggccgaggacgatttccgccgcagtaacccgcgcttccagggggaaaacttcgcccgcaacctggcgctggtggagaaggtgagcgagctggcggcgcagaagggcgtcaagccttctcagttggcgctggcctgggtattggcgcagggcgaacacattgtgccgatccccggcaccaaacgccgtcgctatctggaagagaacgtcgctgcggcggagatcgcgctgagcgcggctgaactggcggcgatagaagcggtgtttccgctgagcgcggcggccggcgatcgctacggcgcggagtcgatgacctacatcaacggttaaaaaaaagcgcggcctgcaggccgcgctctgtcgttttccgccaacggcgaattatttcttcttcggcgcgcgcggcggacggccgacggtcgcctggtacaccttgaagcggccgttttgcgccagcacttcgtggctgccgaaggtggcgtccagaatgtccgggtagggcaggaaggcgttggcgacgatgcgcagttgacccccgatcggcaggtgcttcaccgcgccgcggatcagcgtttcggcggcggtcaggctggtctgcagcccgtcgtggaacggcgggttggagatgatcatgtcgaaacggccggtgatatcggagtaaacgttgctgacgatcacttcgccttcgatgccgttggcggccagcgttgcgcggctggattccaccgcggcggcattgacgtcgctgagggtcagtttcaccttcggcgacagcttggccatcaccgaggccatcacgccggcgccgcagccgatgtccagcaccttgcctttcatgtgtttttccagcgtcgacagcagcagcgagctgccgacgtccagaccgtcgcggctgaacacgcccggcagcgttttaacttccagatcgtgcagctgatagctgtcccaccactcgttcaggtcgaactcggtctgcgcgtccaggcggccgtgatacaggccgcagcggcgcgcgctgtcgattttcaccagcgcaacgtggccttccagcgttggctcggcgctgcgcacgccgctgcggttttcaccgaccacgaacacgtccgcgcccaccggcagcagcgccagcaggttgcacagctggaattgcgcttcctgcttgctcttcggccagtagtaaaccagcgtgtcgcagtcggcgacgaaagcgggatcgacggtcaaaccgaactgcacgttatcgcccatcgtccggttcagtaactgccagtgatggtattgctgagtgtggacgcgcacgtccgcggcctcgaattgggccggcaggctgtcctgcaggtcgccggcaaacagcacgcggcgttcgataaattcatcactgtggcgcagcatgacttcactggcgggggttaatgcagacatcagatattggctcctggaaatgagaccggggattatagagctttgtggcgatatgttcgacgggtttgttggcgcgggctgcgcgggtttgttagcatagcgcggcgcatggcaggcatggcgcaccacaacgggtaggaatcggcatggcatcaaaacgcgactggctgttacaacaactgggtattacgcagtggacattgcgccgcccgggcgtgttgcagggcgaagtggcggtcagtctgccgcccgaggcgcgcctgctggtggtcgcgcagacgctgcccgcacccgacgatccgctgttttgcgacgtgctgcgcagcctggggctgacgccggcgcaaacctacagcctgacgccggaacaggcggcgatgctgcctgcagagaccacatgcaacagttggcggctgggcgtgacggaaccgctcgcggtcgccggcgcgcagctacacagcccggcgctggccgagctttcccaagacgcgggggccaaacgcgccctctggcagcagatttgtcatcatgaacacgatttctaccctgacggcggccgacctggccacagccttcaccattgagcaagccagccacgcctttccctggacggaaaccaccttcgccagcaatcagggcgatcgctaccttaacctgaagctgagcgccgacggggagatggcgggattcgccatcacgcaaatcgtgctggacgaagccacgctgttcaacatcgccattcatccgcagcaccagcgccggggttttggccgcctgttgctcaacgcgttgatcgaacagctggagagccgcggcgtggtcacgctgtggctggaggtgcgcgcctccaaccaggcggcgatcgcgctgtatgaagatctcggtttcaacgaagtcaccgtgcgccgcaattattacccgagcgcccacggccgcgaagacgcgatcgtgatggcgctgccgctggcgtaatctaaaaacatcctattgattgttttcctcccctttaacaactgaaaagttgtttcctgattaatttacatcaaacaagttgtttttcgctgtgacgacaactaatttgttgtttattgttgaggaaacaatcaatgcgttgtttggaggtggggatgagaaaattatcagaaatatcagcgttgctgaaagaaaaacgcattgagttgggctggagccaaaaagactttttgatgaagattggcatgactcaacagcaatatcagcgtgttgaatcgggcagcgatatgcggatgagcacgctgctacggatattggcggcgatggatttggaatatgttatcgtgccgaaaaggtctgtccgtgatgtggagtgcttgctgcaacagactgtgagtcatgcaccagaagtgagtaacttacagaatttcgaagaaaaactgaaagatctcgaggactagcgaatgaaagggctgcgacaggttgaatcggtgcaggcgttagccttgatattgcatggtgtgcgggtgggcgtgctggcgcactacagcggcggcagaaacatcctgacgtttgatccgcactacctcgctttgccggagcctgttcgtcccctgtttacgctaaggcagaaggcgcacgcgggatatcttgagcaagttttacagtcatcgcagcgccttccgcccgtcttatccaatttattgcccgaaggcgcactgcgcagttggttggcccagtcgttgaaaacccatgtgaatgaggagtttcctttacttgcctgggccggggaaaacttgccgggagcgcttgaagcacggccgctggccgccagtgatatccccgcttgggcgttaacgtcgcgcggagagctggaagccgtgcaaattgatgttggagtggcggcgcagaaattttctctggcaggggtacaaatgaaattttcctctgtgcgcaaagagggccgcttcaacatttcttctcaggtgggcgctgatagctggatcattaaaacgccttcaaccgttcatcgtcatctccctgaaaatgaatatacggcaatgcgtttggcgcaagccatcggcgtggatattcctgatattgagctggttgagctgacacggcttgaacacttgcctgatattcgcttggcggatgaaccctatgcgtatgccattcgtcgttttgaccgcagtgaaagtgggcgagtgcatacagaagattttgcccagatattcgagatctatccacacgacaaataccgcggcaaaaattacgatcagatagcggcttatctctatgagtttggcagtgaatctttagcggatacgcagcaaatggcgcgccgtctgttggcgaatattctgctcgccaatggcgatgctcacgtaaaaaattggtccatgatctatccaaaccaggccgatgtgcggcttgctcccgcttatgacatcgtcactacattggcttatatccctggtgagtctgaggttgcgctcaatatggcgaaggaaaaacgctgggataggatctcaatgcgaaccttcgagcgctggtccgatcgagtcgatattccctggcccgcaatacgggtgcatctcttggatgccatcgacaaggcgcgagctttgtggccggcattgttggcggacctgccgatggcggacgatcacaaatcggtattgcgtcggcattgggccgccttgtcccccgatttccgcctgtgttagcgggaaatcggatccattgattgtcaccggttggcaaatcggcgaaaatgcccggctgttatcttttattcaccgctttgcccggcgccgcgatcggcgcgttctgatgatgtcgcagggcggactaaccgtagaacctgaaaaccatgtctcctagtgaatttgcccgcgaagtctccaaaagaagaactttcgccatcatctcgcaccccgatgccggtaaaaccaccattaccgaaaaagtgctgctgttcggacaggcgatccagaccgccggtacggtaaaaggccgcggctccagccagcacgccaaatccgactggatggaaatggaaaagcagcgcgggatctcgatcaccacctcggtgatgcagttcccgtaccgtgacagcctggtcaacctgctggataccccggggcacgaagacttctccgaagatacgtatcgcaccctgaccgcggtcgactgctgtctgatggtgatcgacgccgccaagggcgtagaggatcgcacccgcaagctgatggaagtcacccgcctgcgcgacacgccgatcctgaccttcatgaacaaactggaccgcgacatccgcgatccgatggaagtgatggatgaagttgagcgcgagctgaagatcgcctgctcgcccatcacctggccgatcggctgcggcaagctgttcaagggcgtttaccacctgtacaaggatgaaacctacctgtaccagaccggtaaaggccacaccattcaggaagtgcgcatcgtcaagggcctgaacaacccagagctggatgcggcggtgggcgaagatctggcggcgcagctgcgcgatgagctggagctggtgcagggcgcttctcacgagttcgatcaggaagctttcctgagcggcgagctgacgccggtgttcttcggtaccgcactcggcaacttcggcgtggatcatatgctggacggcctggtggcctgggcgccggcgccgatgccgcgcaaaaccgacacccgcgaagtgacggcggcggaagagaaattcaccggcttcgtgttcaagatccaggccaacatggatccgaagcaccgcgaccgcgtagcctttatgcgcgtggtgtccggccgttatgagaagggcatgaagctgcgccaggtgcgcaccggcaaagacgtggtgatctccgacgcgctgacctttatggccggtgaccgttcgcacgtggaagaagcctacccgggcgacatcattggtctgcacaaccacggcaccattcagatcggcgataccttcacccagggtgaagacatgaagttcaccggcattccgaacttcgcgccggaactgttccgtcgcattcgcctgcgcgatccgctgaagcagaaacagttgctgaaggggctggtgcagctgtccgaagagggcgcggtgcaggtgttccgcccgatcgccaacaacgatctgatcgtcggcgcggtcggcgtgctgcagttcgacgtggtggtggcgcgcttgaagagcgagtacaacgtggaagcgctgtatgagtcggtcaacgtgtcgacggcgcgctgggtcgagtgcgacgacgtgaagaagttcgaagagttcaagcgcaagaacgagatcaacctggcgctggacggtggggacaacctgtcctacatcgcgccgaccatggtgaacctcaacctgacgcaggaacgttatcctgacgtgaccttccgcaagacccgcgaacactgatcaatcggcagggcgcccggtgcgccctgccagttccccgtattctcactccgctaattaataaatcttcctcatattttatcctgcgaatcgatgccgcccaggcgagacgcgattggcctgcgttttccgccacatggtctatctttaacgagatgcccgcacattgcttgagagtaaatcactgcaatacgctgattgtttggtgagttattctgatgtgttgccgataggagacagtctgtttccttaaatatcaatgagatgactgttttaccgtttcgtgtcacttggtctgtcgtcaataggcgacagttttttgattaaaaatccgactcaacgctttttttgtttgatttttaaggtgtttatggagttggcacggcggttgcaatattcctgtcgtgaacgcttaatcgtatagcgatgatgaagtatttaccgagaggccgcgtgaaggcggctgaagggttccggcgctctggcgctggggcccccaacaaaaggaagagatcgatgaaaaagaccaaatttgcacactcgttgatggctgttgttttgggttctgctttggtgagcggcactgcgctggccgaagacagtctgctcaacaaggcgtctaacgccgcggacagtgccggtgccaaaatcgatagctccatgaaaaaagttgacggttacatggatgacagcgcgataacggctaaagttaaaagtgcgttggtggacgataaaaccatcaaaagcactgacatttcggtgaaaaccgaaaaaggcaccgtgatcctgagcgggtttgtcggcagtcaggcgcaggcggagcatgcggttgcggttgccggtaaggtggaaggcgtcaaaaccgtcagcgacaagctgcacgtgaaagatgaagccaaccagtcgatcaaatcgtatgccggcgacaccgccaccaccagcgagctgaaagccaagctgctggccgatgacatcgtgccgtcgcgcaatgtgaaagtggaaaccaccaatggcgtggtgcagctttccggtgaggtgaaaacgcaggcgcagtctgagcgtgccgaaagcatcgccaaggctatcgacggcgtgaaaagcgtgaaaaacgacctggtggtcaagccgtaatcccgccaggcgcccgtaacaagtaacaacaagccgcatctgtcgggccgtgaaggcggcccgacgtgtaccaccaaaaaaagaaactgatttgccgtcgatgtcccgttgtcggggcggtagatggcagcgaattttttcacaatggtaaggagaagcttatgtttcgttggggcattatctttttagtcatcgcgcttatcgctgcggcactggggttcggttcgctggcgggcaccgccgcctgggccgccaaagtcgtgttcgttgtcggcatcatcctgttcctggtcagtctgttcaccggccgtcggcgcccttagccggccggcattttcctgcaaactgtaacaaagcttaattccttttctcacgtcggggagggccggccatgaacagcgacatcatcgtcgggcgctggaaacagctgaaaggtcaggtatggcaggcgtgggccgaatggtccggcagcgatggtgcctggttggccggcagcaatgatttcctcgtcggcgtgctgcaagaggattacggaagagagcgagacgcggtatcctcggagaaaacgtctcactgaggatgccaagttgggatacagaatacccatcacgctcggcaatatagaaccgctggcgtctaaaccttttcgaccaggaaaaatggcgttggtctgcgaaggcggcggccagcgcggcattttcaccgccggcgtgctggacgagttccagcgcgcgggctttaaccctttcgatctgctgatcggcacatcggccggcgctcagaatctgtctgcctacatctgtgggcagatgggctacgcgcgccgggtgatcacccgttacaccacctcggcccagttcttcaatccgctgcgtttcgtgcgcggcgggcatctgatcgatctcgattggctggttgatacggcggcggcgcagatgccgctggcgatggacgtggcggaacagcattttatcgacgggcgcgaattcctgctgtgcgcctgccgcagcgacgatttcgaaccggcctatctgccggcgcagcgcgaacgctggctgccggccatcaaggcgtccagcgccattcccggcttttaccgtcagggcgtggagttggacggcgtcagctatcaggacggcggcatcagcgatgcgatcccagtggaagaggcctaccgccgcggcgccgacaccatcgtggtgatccgcaccgtgccttcgcaaatgtactacaccccacagtggatgaagcgcatggagcactggctgagcgacagcagcctgcagcagatggtgcgcatcctgcagcatcatgagcaaagctatcaccgcatccagcgctttattgagaaaccgccgggcaagctgcgcatcttcgagatcttcccgcctaagccgctggccagcaatgcgctgggcagccgactgggggcgctcaatcaggattatcacctggggcgccgctgcggccgctacttcctggccaccgtcggccagtggatggcgcagcaggaaccggacggtatcaaggtgcaaaaatcgttgtcgcgccgcctgatccagccggagaacgtcagaatgccttcgccgatcgtgaccgacatcgccatgtcgcccgatctcacggcgcagccggaggctgcggtggcggcgccgaaaatcatcctgccgggcgatctgccgccgggtgaagggggcgcgctgtgagctacgcctttaccgacacccactgccatttcgatttcccgccctttaccggacatgaggctgagagcctgacgcgggcggcaagcgccggcgtaaagcgcatcatcgtgccgacggtcaccgccgatcgcttcgcgcgggtgttgcggctggcgcaggagcatgcgccgctgttcgccgcgctggggctgcacccgctgtatatcgcgcagcatcatgagccgcagctggaacagctggcggcgctgttggccgaacggccgcgcaagctggtggcggtgggggagatcgggctcgatctgtatatggacaacccgcagttcgagcgccagcaaagcgtgctgctggcccaactgaggctggcgaaacagcatgacctgccggtgatcctgcactcgcggcgtacccacgatcagctggccgccgcgctgcggcgcatgcagctgccgcgccgcggcgtggtgcacggcttcgccggcagcctgtcgcaggcgcaggcgtttatccgcctcggctattacatcggcgtgggcggcaccatcacctatgagcgggcgcagaaaacgcgcggcgtgatggcgcagctgccgcttgaggcgctgctgctggagacggatgcgccggacatgccgctggccggctatcaggggcggccgaatcgccccgagcgtgccgccgaggtgtttcacgcgctgtgcgagctgcggccggaaccggccgacgagatcgccgcccatctgcaacgcaatacccagtcactgtttgcaatgccggattgacgagcttataacgtgacttgcgtcacgttataagattttcatttgcgtctcgttgtatacatttgtgacataaatcggtgcgagggtgacctcgctcagtataatccccccgaaactctccaatagcagacctctcttcatgagcagggatgtattttattttttgcaacagggaaactttgcatgcaactcatcatgagtctggtcggtatggcggtgctgatcgccattgcggtgctgctctccagcaaccgtcgggccatcaaattgcgcaccgtggtgtgggcgttcatcattcaggtcggcatcggcgcgctggtgctgtacgtgccgctgggccgcagcatcctcggcagtatgtctaacggcgtggcaaacgttatcgcctacggcaatcagggcatttcgttcatcttcggcgggctggtgtccgacaagatgttcgaggtgttcggcggcggtggtttcgtgttcgcgctgcgcgtcctgccggtgatcgtgttcttctcctcgctgattgcggtgctgtactacctcggcatcatgcagttggtgatccgcgtgttgggcggcggcctgcacaagttgctgggcacctcgcgcaccgaatcgctgtcggcgaccgccaacattttcgtcggccagaccgaagcgcctttggtggtgcgcccctatatcgccaccatgagccagtcagaactgttcgccgtgatgtgcggcggcctggcctcggtagccggttcggtgttggcggggtacgcgcagatgggcgtgccgctggaatatctgatagccgcgtccttcatggccgcgccgggcgggctgctgttcgccaagctgatggtgccggaaactgagcagacccacgataaagacgatgcgatgaagctgatcgctgaagaagatcgtccggccaacgtgatcgacgcggcggcttccggcgcggcttccggcatgcagctggcgctgaacgtcggtgcgatgctgctggcgtttatcgcgctgatcgccttgcttaacggcattctcggcggtatcggcggctggttcgattacccgcagctgtcgctcgagctgatcctcggctgggtgttctcgccgatcgccttcctgatcggcgtgccgtggagcgaggcgatgaccgccggttcgttcatcggccagaagatcatcgtcaacgagttcgtcgcctacatgaacttcggcgcctatctgcgcccggatgacgtagtggcggcggaaggcctgcaggtgctgtcgacgcacaccaaggcgatcatttcctttgcgctgtgcggcttcgccaacctctcctcggtggcgatcttgctgggtggtctgggcagcatggcgcccaaccgtcgccacgacatcgcgcgcttcggtctgaaggccgtggcggcgggcacgctgtccaatctgatgagtgccaccatcgccggcttcttcctggcgctgtaagccatcacggagcccgcgacggcgcgaccgatcgcgggactccgcctatactctaagcaacgcgggtgcttgccgcatccgcgatcttcagccgcttctttagcgaatttgtgaacgatatcgcgttattttgtgatgctcttcacatataattccggtctgttacagtgctatttcatatagtgtgacgatgaacgcgaatcgcctccggcattcgtgttcaaatagctattactggccggccgcaaggcgggtggccatgtgcggtgagaaggatctcagttgccgccgcgggaacgccgttccccagcgctatcttcatggaaccaagtccgctcgccaacacccaggtactcagttggagagttttatgaccgaattaaccgcagcagcgcaacgtgcgctgaacttgatggatttaaccacgctgaatgatgatgacaccgacgagaaagtgatcgcgctctgtcgtcaggccaacagcccggccggccacacggcggccatctgcatttacccgcgttttatcccggtggcgcgtaaggcgctgcgcgagcaaggcacgccggacatccgcatcgccaccgtgaccaacttcccgcatggcaatgacgatatcgacatcgcgctggcggaaacccgcgcggcgatcgcctatggcgcggatgaagtggacgtggtgttcccataccgtgcgctgatcgccggcaacgaacaggtcggcttcgagctggtgaaacagtgcaagcaggcttgccaggcggccaacgtgctgttgaaagtgatcatcgaaaccggtgagctgaaacaggccgatttgatccgcaaggcgtccgagatcgccatcaaggccggggctgactttatcaagacttccaccggcaaggtgccggtcaacgccaccctggagagcgccgagctgatgatgtcggtgatccgcgatctgggcgtggcgaagacggtgggcttcaagccggccggcggcgtgcgcaccgcggaagacgcgctgcattatctgcaacttgccgatcgtattctgggcgaggggtgggccgatgcgcggcatttccgctttggcgcttccagcctgttggccagcttgctgaccgcgctgggctaccagacccagaccgccggcggcggctactgatcgatttcgttggcgggcgccaggcgcgcccgtctgcaccgactctcggcgacacagggggatgccttgttcctggctcaagaaattattcgtaagaaacgcgacggccagccgttaagcgaagcggaaatccgctttttcatcaacggtattcgcgacaatgtggtgtcggaagggcagatcgccgcgctggcgatgaccatttatttccatgacatgagcatgccggagcgcgtggcgctcaccatggcgatgcgcgattccggcaccgtgctggactggaagagtttggcgctgaacggcccgatcgtcgacaagcattcgaccggcggcgtgggcgacgtgacctcgctgatgctcggcccgatggtggcggcctgcggcggctatgtgccgatgatctccggccgcggcctgggtcataccggcggcacgctggacaaactggaagccattccgggcttcaatattttcccggacgataacgccttccgtaaaatcattcaggacgtcggcgtggcgatcatcggccagaccagctcgctggcgccggcggacaaacgtttttacgccacccgcgacatcaccgccaccgtggattctatcccgctgatcactgcctccattctggccaagaaactggcggaagggctggatgcgctggtgatggacgtgaaggtcggttccggcgcctttatgccgacctatgccctgtcgcaagatttggcgcaggcgatcgtcggcgtggccaacggcgcgggctgcaagaccaccgcgctgctgaccgacatgaaccaggtgctggcctccagcgccggcaatgcggtggaagtgcgcgaagcggtgcgtttcctgaccggtgaataccgcaacccgcgcctgctggaagtgacgctggcgctgtgcgtggagatgctgctgtccggcggcctggcgaatgacgaggccgatgcgcgtgccaaactgcaggcggtgctggacaacggcaaggcggcggaagtgtttggccgcatggtggcggcgcagcaagggccgatagacttcgtcgaacgttatgatagctatctgccggcggcaacgctgagcaagccggtgtatgctgaaaatccgggcatcatcagcgccatggatacccgcgcgctgggcatggcggtggtttcgctgggcggcggccgccgccgggcgagcgacgccatcgattacagcgtcggtctgaccgaggtggcgcgcctgggtgataaggtggatgcccagcagccgctggcgatgatccacgccaacgatgaagagagctggcagcaggcggccgatgcggtgcgtagcgcaatgacgctgagtgacaaggcgccggaagcgacgccggtagtgtataagcgcgtcacggaataacccaagaatcaggaacggccgcggctttttcgcggccgtccaaagcgtgagaacacgcaggagagcacagatgaaacgcacatttattatggtattggactccttcggcatcggcgccagcgaagacgccgatcgttttggcgaccggggttccgacactctgggccacatcgccgaggtttgcgcgcgcggtgaagccaacgtgggccgccagggtccgctgacgctgcctaacctgagccgcctggggctcggcaaagcggcggaagagtccaccggcaatttcccgcaggggctggatcgcaatgccgacatcatcggcgcttacgcatacgccagcgagctctcttccggtaaagacacgccgtcgggccactgggaaatcgccggcgtgccggtactgttcgactggggctatttcaaggacgagcacaacagcttcccgcaggcgctgctggataagctggtggagcgcgccaacctgccgggctacctgggcaactgtcactcatccggcaccgtgatcctcgatcagctgggtgaagagcacatgaaaaccggcaagccgattttctacacctccgccgactcggtgttccagatcgcctgccatgaagaaaccttcggcctggatcgcctgtacgagctgtgcgaaatcgcgcgtgaagagctaaccgaaggcggttacaacatcggccgcgtgatcgcgcgtccgttcgtcggcgacaagccgggccacttccagcgcaccggcaaccgccacgatctggcggtagagccgccggcgccgaccgtgctgaaaaagctggtggacgagaagggcggtgaagtggtgtcgatcggtaaaatcgccgacatctatgccaacgtcggcatcaccaagaaggtgaaagcgaccggcatcgacgcgctgttcgacgcgaccctgattgaaatggaaaaggccggcgacaacaccatcgtgttcaccaacttcgtggacttcgactcctcttacggccaccgccgcgacgtggcgggctacgccgccgcgctggagctgttcgaccgccgcctgccggagctgctgaagctggtgaaagacgaagacatcatcatcttcaccgccgaccacggctgcgacccgacctggccgggcaccgaccacacccgtgagcacatcccggtgctggtctacggcccgaaagtgaaaccgggctcgctgggccaccgtgagaccttcgccgacatcggccagaccgtcgccaattattttggcctgtcgccgatggattacggtaaaaccctgttttaattcgtgagtttaaggcggtggcgcagttggccgccgcctgacataccacggcttatacgtttaacgctatttaatacgatttaaaggaagagaattatggctacgccgcacattaatgctgagatgggtgatttcgctgacgtagtactgatgccgggcgatccgctgcgcgcaaaatacatcgccgaaaccttcctggaaggcgcggtggaagtgaacaacgtgcgcggcatgttgggcttcaccggcacctacaaaggccgccgcatctccgtaatgggccacggcatgggcatcccgtcctgctccatctatgcgcgcgagctgatcgccgaattcggcgtgaagaagatcattcgcgtgggttcctgcggcgcggtgcgtgacgatatcaaactgcgcgacgtggtgatcggcatgggcgcgtgcaccgactccaaggttaaccgtctgcgcttcaaggacaacgactacgcggcgatcgccgacttcgacatggtgcgcaacgcggtcgatgcggcggcggcgcagggcatcccggcgcgcgtgggcaacatcttctccgccgatctgttctacaccccggatccggacatgttccaggtgatgaagaagtacggcatcctgggcgtggaaatggaagcggccggcatctacggcgtggcggcggagctgtacgaagagttcggctgcaaggcgctgaccatctgcaccgtgtccgaccacatcctgcgtcacgaagcgaccacggcggcggaacgccagaccacctttaacgaaatgatcgttatcgcgctggaatccgtgctgctgggcgacaaagcgtaataccgcggcgggcgtcgccatggcgcccgcccgtcaatctattcactccgcatggccgtttttggctaacgctctacctttcaattggatgtggatcccgttgttacggacaatctattcaccgaaaggacaagaaaacggcacggacgcattcaacgcctggcctgagttactccttcttcggcgcttcctgctttgtctccggcgcatcctcttcgtcgtcttccaccgtattgccttcttccagtggcgtgttggcggtcaacaggtagggcgactgctgccagcggctgcggcggtgctgcagcagggtgcgcgccagaatgatgccgatcgccagcgccagcaggatcatcaggcgcagcaggttggtggtgttgtccacctgtttggattcggtcgccagcacgtgggtgtcgagggtgatgcggataaagccgatcgggccgtctttgccctgaatggattcgaccaattggtggttgaagtagctgccggcgcgtttgccgtcgagcgacaggcgatcgcgtatacttatctgctccccggcgtgggagaccagcgtgccgtccaactgatacacgctgacgtcgagaatgcggctgtgatcggtgagctgcttgaggatggcgtcgatgcgcgggttgttgccgtcgtcgtccagcagcggcgccaggctgtaggcgacctgtttggtcagcgtctgcgccagctcttccacctgctcggatcgcgccatttggtgactcaggctaaaataagaggcgccctgcatcagcagcaccagcaaagccaggcaaatcaggataatagcggtgcggtgcaggcgaaatttcagtttagcgcgagccatgcaggttccttgggcatcggggacactttatgttgccagaaccgctggcgataggatagcttgatgcgtcgttttatcatgcagcgtttttgtccattcaggagtcaatgatgtcaaacagtctgacctattgcgatcttccggcggagatctctcaatggccgggtcttcccctttcgctcagcggcgacgaagtgatgccgctggactatcgggcgggcaataccgggtggctgttatacggcaggaagctggacaaggcgcgcattacccaattccaacgcaagctgggcgcggcgatggtgatcgtcaccgcctggggcgtggacgactatcaggtggtgcgcctggcgggcaccttgacgccgcgcgccaagctgttggcggcggagagcgggctggacgtggcgccgctcggcaagatcccgcacctgcgcacgccggggctgctggtgatggacatggattcgacggcgatcgagatcgaatgcatcgacgagatcgccaaattggcgggcgtcggcgagcaggtggcggaagtcaccgaacgcgcgatgcgcggcgagctggactttaccgccagcctgcgccagcgcgtcggcacgctgaaaggggccgatgccaacatcctcaagcaggtgcgcgacgagctgccgttgatgccggggctgaccagcctggtgggcaagctgcaggcgatgggctggcatgtggcgatcgcctccggcggcttcacctactacgccgaatacctgcgcaaccggctgcggctggtggcggcggcggccaatgagctggagatccgcgacggcaagctgaccggcgaagtgctggggccggtggtggacgcgcagttcaaagccgacacgctgctgcggctggcggggaagctggagatcccgctggcgcaaaccgtggccatcggcgacggcgccaacgatttgaaaatgatgcaggcggcggggctgggcatcgcctaccacgccaagccgaaagtgtatgaaaaagcgcaggtatcgatccggcatgcggatctgatgggcgtgctgtgtattctcaccggcagcctgaaacacgaagtgcgataacgaaagattgaggtaagacgtggcaaaagcggcaaaacgggcatttgtgtgcaatgagtgcggggcggactatccgcgttggcaggggcagtgcagcgcctgtcatgcctggaacaccatcacggaagtgcgtttggccgcgtcgcccgcagcggcgcgcaacgatcgcctcagcggctatgccggcgacgccggcgtcagcaaggtgcagaagctgtcggaaatcagcctggaggcgctgccgcgcttcaccaccggctttctcgagttcgaccgcgtgctgggcggcggcgtggtgcccggcagtgcgattctgatcggcggcaaccccggcgccggcaagagcaccctgttgctgcaggtgttgtgcaagctgtctgaacagatgaaaaccctgtacgtcaccggtgaggagtcgctgcagcaggtggcgatgcgcgctcaccgtctggggctgccgaccggcggcctgaacatgctgtcggaaaccagcatcgagcagatctgtctgatcgctgagcaggaacagccgaagctgatggtgatcgactcgattcaggtgatgcacatggcggacattcagtcttcgccgggcagcgtggcgcaggtgcgggaaaccgccgcctacctgacgcgcttcgccaagacgcgcggcgtggcgatcgtgatggtcggccacgtcaccaaagacggctcgctggccgggccaaaagtgctggaacactgtatcgactgttcggtgctgctggacggcgacgccgattcccgcttccgtaccctgcgcagccacaagaaccgcttcggcgcggtcaacgagctgggggtgttcgccatgaccgaacaggggctgcgcgaagtcagcaacccgtcggcgatcttcctcagccgcggcgatgaagtcacctccggcagctcggtgatggtggtgtgggaaggcaccaggccgctgctggtggagatccaggcgctggtggatcactcgatgatgtccaacccgcgccgcgtggcggtgggcctggagcagaaccggttggcgatcctgctggcggtgctgcaccggcacggcgggctgcagatgtcggatcaggacgtgttcgtcaacgtggtcggcggggtgaaagtcagtgagaccagcgccgatctggcgttgctgatgtcgctggtctcgagcctgcgcgatcggcctctgccgaacgatctggtggtgttcggcgaagtggggctggcgggggaaattcgcccggtgccgagcggccaggagcggatcgccgaagcggccaagcacggcttcaagcgcgccatcgtgccgcacggcaatatgccgaagaagccgccggccaacatgcaggtgttcggggtcaagaagctggcggacgcgctggacgtgctggaagagttttattaatgtcgccgacggcgagcaagatatgctattttgtttagcatactaaacggaggtggccatgccgcaatttgattacctgaagacgtccatcaagcaaaaaggctgcacgttgcagcaggtggcggatgccagcggcatgaccaagggctatctgagccagctgttgaacgacaagatcaaaagcccgagcgcgcaaaagctcgaagcgttgcaccgttttctcgggctggagttcccgcgtaaagaggttaaagtcggcgtggtgtttggtaaattttacccgctgcacaccggccatatctacctgatccagcgcgcctgcagccaggtggatgagctgcacgtcattttgtgccacgacgagccgcgcgaccgcgaactgttcgagaacagttcgatgtcgcaacagccgacggtcagcgatcgcctgcgctggctgctgcagaccttcaagtaccagaaaaacatccatatccactcgttcgacgagcagggcatcgagccctacccgcacggctggaacgtgtggagcgacggcatgaaggcctttatggaacagaaaggcatcgtgccgagctttatctattccagcgaagcgcaggatgcgccgcgttaccgcgagcatctgggcatcgaaaccattctggtcgaccccgagcgttcgttcatgaacatcagcggcaatcagatccgccaggatccgttccgctactgggattacatcccgaccgaggtgaagccgttcttcgtgcgcaccgtggcgatcctcggcggcgagtcgagcggcaaatcgacgctggtcaacaagctggccaacatcttcaacaccaccagcgcctgggaatatggccgcgattacgtgttctcgcacctgggcggcgacgagatggcgctgcagtactccgactacgacaaaattgccctcgggcaggcgcaatacgtggatttcgcggtcaagtacgccaacaaggtggcatttatcgataccgatttcgtcaccacccaggcgttttgcaaaaagtacgaggggcgtgaacaccccttcgtgcaggcgctgatcgacgaataccgtttcgatctggtgatcctgctggaaaacaacacgccgtgggtggcggacggcctgcgcagcctcggcagtaccgccgatcggctggcgttccagcgcctgctggaggagatgctgcgcgccaacaatatcgagtatgtgcacgttgagtccagcgattacgaagagcgcttcctgcgctgcgtcgagctggtgcaacagctgctggcggcggacgccggccggttggcgaacgcgcccgcccagcatcacgccgcaggctgagcaaaattagcgtaatgtgcgatcgcgcggcagaaacggccgcccgggcgcacatttaacggcttgtttaaacatggttcattcgacagcgactacgttaagcttttctttacaataacgcttagaagaagacatgtcttatcgcttgctcgctctttggttggtctgctatgccgcagcctggacgctgctgactgttcatctcgatcctaccctgccttacgacgccgtcgaggcgctcaactggggcctcaacggcgaatggggctcaccgaaaaacccgtggctggtcggggcggcgatgcagccggcgatcgggttctcgtggctgccgctgaacctgtactggtatggcgggcacttcatcgccatcgccatcggcatgttgggcgtctggctgttggcgcgccggctgagcggcagcacctcgctggcctggatggcgctgttgacgctcaacctgtccggcatcatcaatttcgacatcattccctacaacgacaattacctgttggtgatgctgtggccgtggatggcgctgtttttccacctggctatatcgcgttcggccaactggtggccggccttcgcgctgacggccggtttggcgatgatggcgaagtactcgaccttcgccttcgtctatttcgccgcgctgtcgacgctgttcgtaccgcagatccgccgctgttatcgccagccgcagttctatctggcggtggcgatctggttggcgctggtgttgccgaacgtgttctggttgtggaaccacgatttcgccgccttcaagtgggtggattcgcagatcaagatgcagctcaatctcgacatgctgcagtcgctgctgctggtgttctatccgtcgctggtgctgtgggggatcctgcggcgcagcggggcggtgctggcctggccatcggcgttgccgatgcgggtgttgctgtgggtctacctgttgccgctcggcatcattaccttctggttctctttcaacgtcggcggccggctgaccgaatggctgcagccgttcttcatgctggcacctgcgctgttggtcggttgcgtgcgccagccgccggtgcgttcgctgcgcgcggcgaccattggtctgatgtgcgcggcgctggcggtctacctggggtatgccgcggtgatgctgggcaacgtgcgcaacgccggtcagaaaatggtgggtatcaaggcgttcagcgccgaggtggagcggcagtggcaggagcggtatggcgttgaactgcgctacgtcggcggcgaatacctgtcgcagtggatgacggtgtacgccggttcccggccgcgaaccattacgcgttggtccaatcatacgcggccgaatatctacaacgtcaacatcagctatccgcagattgcgcagcacggcgttgccctgttcgggcggttgggtgaggactgcgcgcgcagcgacttcggcggcgagttggcccactggccgaagatgcgcctcgattggcagcagacgctgacgttccgcgccgatccgcatagcgacgagcagacgctgtgcgtcggtttcgttcgtccgcagtaacggcggcgcgctgcgccgccgcgattcaggctcagtaagcgataaccagcttgccttgcatatggccgccgagcagctgttgatgcgcggcggtcagcgtgtctaccgacagcccgtgcagggtttcgctcagtgtggtgctcagcttgccctcgtccagcagctgcgccacctgctgcaggatcttgccctgctgcgcgatgtccggggtggtgaacatgctgcgggtgaacatgaattcccagtgcagcgcggcgcttttcagcttcagcgcgttttggtccagcggctgcgcgttttcgacgatggtgcagatatggccgagcggcgcgatcagttcggccatcgccggccagtggccgtcggtatcgttcagacacaggatgtaatccacctgctcgatgccctgctgcgccaggttgcccttcagatcgcggtagtccaccaccagatcggcgccgcgctcaaggcaccaggcggcggattccggtcttgatgcggtggcgatcactttcaccttgctgcgcagcgcggccagcggaatggccagcgaaccgaccccgccggcgccgccgatgatcagcagcgtcttgtgctccggcgcgtcctgaatgttcaggtgttcgaacagcgcctcccaggcggtgagggcggtgagcggcatggcggcggactcggcccagttcaggctgcgcggcttgtgcgcggcgatgcgtgagtcgatcagttggtgactgctgttgctgccggggcgggtgatgtcgccggcgtaccacacttcatcgccgggcttgaagccgctgacgccgttgcccacgtccaccacgacgccgctggcgtcccagccgagaatgcgcggctgctgcaggccgtttttctgcagaccggcgtgcactttggtgtccaccgggttgaccgacgccgctttcacttccaccagcagatcgtactggccgggcaccggcatctccggtgagatttcgatgaaatcgacggggttctgcgggtctacggcaatggcttttatcgacatgattgtactcctttcaaatgatgcccccagtgtagacccgcgacagtggggtgataagatggacaatatctaacggagtgttcgtttaaggtgaacaatggaattcaaacaactgcaggacatggcgttgttcgcgctggtggcggagtgcggcagttttaccgccgccgcgcagcgcgttgggttgccgaaatccagcgtcagccagcgcatcagccagctcgagcagacgctggggctacggctgctcaatcgcaccacgcgccagctgaacctgaccttcgccggtgagcgttatctggaacattgtcaggtcatgatgtctgctgccgaacgtgccgatctggcattgcagcggctgcgcgataacccgagcggccgcctgcgcatctcgacgcccgccgggctgggggcgaccctggtggcgcggctggcagcggattttcagcgccagtacccggacgtttcgctggaggtgtcggtgtccgacgcgatggtggatctggtgcaggaaggtttcgacgccgcgctgcgcaccggcaagccgcaggattcttcactgatcggccgccgtctcgggtatgcgccgcgctatctgttggccgcaccgtcctatttggcgcagcacccgccgatcgaacatccgcagcagctgcagcagcatcgctgtatcgcccaccgcgcctggacggcctggaacctgcgctgcggcgatgactactaccgttggcagctgccgctggcgcacaccaccgacaacctgctgtatgcgcgcgaatgcgccatcgccggcgcggggatcacgctgctgccggcgtttctcagccgcgaggtggtggcgcagaaactgctggtggaggtgctgccggcgtggcgcgcagaagggaatgagctatatctggtctacccgagccgcaagctgaattccgcggcgttggcctgcttcatcgatgtggtgctgcagcatccggcgttcgacgactacgcgcgcgagctggcgcgggagtaaaaaaaggcgccgcatgcggcgcctttcgtattacttggcgatcttcttgtacttgatgcggtgcggctcgagcgcatcggcgcccagcgtacgcttcttgtactcttcgtactcggtgaagttgccttcgaagaattccaccttgccctcgtcctggtagtccaggatgtgggtagcgatacggtcgaggaaccaacggtcgtgcgagatcaccatggcgcagccagggaattccagcagggcgttttccagcgcgcgcagggtttcgatatccaggtcgttggtcggttcatcgagcagcagtacgttgccgccaacctgcagcagcttggccagatgcagacggccacgctcaccgccggacagctcgcccacgcgtttgccctgatcgacgcccttgaagttgaagcggccgacataggcgcggcttggcatctcggtgttgccgatgcgcatgatgtcctgcccgccggagacttcttcccacacggttttcgaaccgtccatgttgtcgcggaactgatcgacggacgccagcttgacggtatcgcccagcacgatgctgccggaatcaggctgctcctggccggacatcatgcggaacagcgtggatttacccgcgccgttcgggccgatgatgccgacgatcgcgcctttcggcaccgagaacgacaggtcgtcgatcagcaggcggtcgccataggacttacgcaggttgctgacttcgaccactttatcgcccaggcgtgcgccaggcggaatgaacagctcgttggtttcgttacgtttctggtattcggtgttgttcagctcttcaaagcgggccaggcgggccttgcctttggactgacggcctttggcgccctgacgcacccactccagctctttctcgatcgacttgcgacgagcggcttcggcggacgcttcctgtgccagacgcgcgtctttctgctccagccaggaggagtagttgccttcccatggaatgccttcgccgcggtcaagttcgaggatccagccggccacgttatccaggaagtaacggtcgtgggtgatcgctaccacggtgccttcgaagtcgtgcaggaagcgttccagccaggccacggactcggcgtccaggtggttggtcggttcgtccagcagcagcatgtccggcttttccagcagcaggcggcacagcgccacgcggcggcgttcaccgccggacaggtgggcgattttggcgtcccagtccggcaggcgcagcgcatcggcggcgcgttccagctgggcgttgaggttgtgaccgtcgtgcgcctgaatgatctcttccaggcggccctgttcggcggccagcttgtcgaagtctgcgccttcttccgcgtacagcgcgtacacttcgtccaggcgcttcagcgcgccgaccacttccgccagcgcttcttccaccgactcacgcacggtgtgttcgaggttaagctgcggctcctgcggcaggtaaccgatcttgatgcccggctgcgggcgcgcttccccttcgatatcggtatcgatgccggccatgatgcgcagcagggtggacttaccggcgccgttcaggcccagcacgccgattttggccccagggaagaagctcagggagatgtttttcaaaatatgacgcttcggcggtaccaccttgccgacgcggtgcatggtatagacgtattgagccacgttgctctaagcctctctatatcagtatttataggatgtctggcggcatgagtgtagcccgtttcgatctcggatcccagacatcgctcagcgatcgctaagtataaccgtttatgcgccgataaaggcgcatattggtggcttatggcgtgacgacgatcgcgacgcggcggttttccgcacggccgctggaggtgcggttatcggcaacgggatcgcgcttgcccatgccgcgggtttcgatattggcgcgtggaatgccgacgctggccagcagatcggccaccgcatcggcgcggcgcagggagagctgatcgttatagctgtcttcaccgtagttgtcggtatggccgtccaggcggaacttggtgatgccgacgctcagcagcgcacggcccatcttctgtaccgtctcggtgctttccgggttcagtttgccgatgttgttgccgaacagcaccttgtccgacaggccgaactcccagccgttatcggtcagtttgaagccctgcgattgcaacagcgcgacctgctcgggtgtcaggccctgcggtttgctctggcagccggcgagcgccagcagagcgacgaacatcatcgtcagcagtgaaaaacggcctttaaaaagttgctgtatcatagtcaaaatccctagttcaagtgttatagccggggctcttatttatgtatagccagccgccagcctccgttataacgatgctttgcctgatacatcgcatcgtcagcttcgtgcaaaagaccctgaggcgtcgatgcgtgatcagggtacagcgcaataccgatactcagagaggtgatgaccgtctcgtcgttcggcagaatgaccggttgcgtcatgcagtcgatgatgttgtcagcgatctgcaagacatcttccgtgctgtgtaccggcgccagcagcacggcgaattcgtcccctcccaggcgggcgaccagatcggtctcgcgcagctgcgcgcgaatgcgcccggcaatggtggtcagcaccgcatcgcctgcggcgtggccgtaactgtcgttcacctccttgaagcgatcgccgtcgataaacagcaccgccaatttcgccggcggttcgatatcgcccagcgcgcggcttagccgcccttcgaagaaggcgcggttcggcaagccggtcaggctgtcgtgcgtcgcccggtgagccagcgagtcgttctcttgcttcagatgggcctgccaggcctccagctcgtcgagcaagccgttgaaatcgttgctgagctcatgcagctcggcgataggcgccgacggcacccgcaggccgaaggtgcgatcgcggcgaaccgcatgcgccacgttggcgatgtcgtccagcgaactgacgatgccgaccagcatgcggcgcgacagcaccagggcgcacagggtgctgagcaccaggcaggcgatcatgccgaccatgccgcgcaacaggaaacgcagcaggctgccgccgttgccgctcagccagacctggccgacctgcttgccctcgtgggtgataggcagaatgaccggttcgggcagcgcccagtgcgcgacgatctgctccaggccgtgcagcggcccatcggtaggatggcgccagttggccagcatcttgccgttgttgtcgaggatccgcgcgtccgatacctcttcgttggaggatatcagcatcagcgcctcgcgcgcggcggtgcggtcttcaaacaccacggcggcctcgacggtatagctgatggagcgcgcgatcaggtgcaggttgtgattggcataggcgcgcagcgcaaacagcgccaccagcgtcaaaaagatgccggcggtgccgacggcgatcagcgccagcccaagatgcacccgctgcagcactcggcccagcgtcgggcgcgcattgccggagcggtttttacgcaacagcctcatagcggcggcgcctgtttgcgtgccagctgcaacacgttggggtgaacgcgcacgccgctgcgcgccagagcgtccaagttgactttgaaactggcctggtccccatcaatctgcaggcaaaatgcgctgccggcggagcattcgctatcgttctcgctgatgctgagaatggagttgccggaaatgcgctgcatgaaattttgtctctgcgcggcggtgatgttccctaagtagatgacatcacagccggtactcagcgttgggctatcgaacggcacgcgctcggctttaatcggacgcggcgcgctcagcaggatcggatcgaacagcccttcggcatactgggtgggtgcggtcacgcacaagcggatcggattaggttcacgcgaccagcgtgcgtagctgatgatgcctaccactacggtcgtcacggcgtgcgtgcgcttttgatagggatcagcggcggcgtgcgcaggctcggacaacgtcagcagcaccaacaaaacgatcagcagcaggcggccgatattcaggcgtgcgtcaaggaagcccggttcggggctttttgcgcaacgcatcgctatcgcggtcttattcaccatcttcacccgccattccggcctgatccactgcccgcaggccgtggcctgacaaggaaaaatccggcccgcttgaagggacaatcgttttgctgaaagctgtcagtcgcactgcctaatgaacactatctaacccataattggcgcggattgtattataagatgtcttcgttgggcgctttatgtgctgttttctcggaattatcttacttatttttgatagtataaaaatgcccacccgggtttgccaccgcttttctgcaaagttggcgcgtttagcccgctgtcaggcgatttgcgcaacggtggcgccatataacaaatcaaataatgtgatgactaataattaaaaagtattttacttctccaataagcgccggggcagctaataaaaatccggtggctggaaatatcccgccggcctgatttgtcagccaaagtaaacgtttttacctggcccgcgtcatggcgatacacttcttcttctacagtattgaatggataagcgattgcgctgtctatggtagatatctgcgtccgggccgtgcgcccggctttattttgtcccgcggcgccgtggtgcggcggtcaccggggagctgggcggctcctgcggtataaccagtgaggaaagagcgaggatggtcaaggtggacaagcgacggctgttggcaatgggcctgtgtctgacggcgttttcaggcgcggcgctggcggattctctggatgcgcaacgtcagcgttaccagcagatcaaacaggcgtgggatggcaatcagatggacgtggtggcgcagctgatgccgacgctgcgcgattacccgctttatccttacctggaataccgcgagctgacacaggatctgagccaggcggggttctccgaggtgaacgactttatcaaacgccacccgacgctgccgccggcgaaatcactggtgccgcgcttcgtcaatgaactggcgcggcgcgaagactggcgcaccctgttggccttcagcgcgcagccgcccaaaccggtggcggcgcgctgcaactattactacgccaaatgggccaccggcgaccagcaggcggcctggagcggcgccgacgagctgtggctgaacggcaaaacgctgccgggcgcctgcgatcgtctgttcagcgtctggcgtggcgcgggcaagcaaacgccgctggatattctggcgcgcatgaagctggcgctgaaagaaggcaacagctcgctggtcagcaacctctatagccagctgccggccgactaccagaccatgggcaacgccctggtgcgcttgcaaaacgatccgaccaccgtggaagccttcgcccgcagcgtggggccaactgactttacccgcgccgctaccggcatcgcctttgaacgcctggcgcggcaggatgtggaaaacgcgcgggcgatgatcccgacgctcgcgcggctgcagaaaatgagcgacgacgaacggctggggttggaagaggcggtggcctggcgcctgatgggcagcgacgctacctacgagcaggcgcagtggcgcgatcaggtgattctgcgcagccgttcgccttcgctgttggagcgccgagtacgcatggcgttgggctatggcgatcggcagggcgtcgcgacctggctggcccgcctgccggaagagtcgcgcaacaaggatgagtggcgctactggcgcgccagtcaactgatggacgaaggcaaacgcgccgaaggcgaggagatgttgcgtaacctgatgaccgaacgcggcttctatccgatggtcgcggcgcagaagctgaacgccacttatccggtgatggtggcggtggcggccaagccgcgcacgtcgctggtcgacgggccggaggtcgcccgggtgcgcgagctgatgtactggaatatggataacctggcccgcagcgagtggggctcttacgtcgccagccgcagccggccggaacaagaagcgttggcgcgctacgcctttgagcaaaaatgggccgatctgagcgtgcaggcgaccatcgtcggcaagctgtgggatcatctggaggagcgcttcccggtcgcctggccgcaggagttccgccgcgcgaccgatgacaaggggattaccaccagctacgcgatggcgatcgcgcgtcaggagagcgcctggaatccgaaagcgcagtcgccggttggcgctaccggcctgatgcaggtgatgccgcgcaccgcgcagcatacggtgcagatgttcaatattcccggttacgtcggcccgagccagctgttcgatccacagactaacatcaccatcggcaccagctatctggagtcggtctatcagcagttcggccgcaaccgcatcctgtcgagcgccgcctataacgccggcccgtcgcgggtgaacacctggctgggcaacagcgcggggcggatcgatccggtggcgttcatcgaaagcattccgttctcggaaacccgcggctacgtcaagaatgtgttggcctatgatgcgttttaccgctatctgacgcaccggccggccaaggtgctgaccgacgccgagtggcagagacgttattgattttgacggccctatggtatgctgctgtactagttaaatagtatggtggctgccatgacgcaattatcgttaaacgaccccgctctttcagaacaaggcaatgaggattggctgcgcttcgtcgcgctgctgcagaattcgtttgcgcaagaactgcatcaaccgctgctgcagctgatgctgacgccggacgagcgcaccgcgctgggcacccgggtgcgaatcatccaggaactgatgcgcggcgagatgagccagcgcgagctgaaaaatgaactgggcgcggggatcgccaccatcacccgcggatcgaacagcctgaaagcggcttcacccgagctgaaacagtggcttgagcagcagctgctgcacgatgcgccctagcaggttttgcgctattgctgatagatggcgttgtgaaacggcaccagcgccagcagcagcgcctggtgataaacgctggtgcggctcagccggccgtcggtgaagacgccgatggcgccgccctggcgcttcacctcggcattgccggtgatcgccgccatttcgctgcccaattcgcgaccggcgcgaataccttgtaagatgacctccggcagcatcaggctcgccgagcgagattcgccgcggatgtgcgggttctcgatggtcatccaggcgaaggtcatattctcttcaatcccggcttccacgccgacccaaaaatcggcctcgggcctgacctggcgcgcttccatgacgcgttgacgcgagccggtgcgggtttcgtgattgcctatcggctgcagcgagacaccgctggcgacgtcaacggattcaatgcggtattggcctgcgccaaagacgtcatcgaaggccagttgaatagccttgatctttgccgggttggtagttgcagcgacaacatggtacataacgggtttgatatccttctggccgatacgccgggcagcggcaaaagcgccaccgggccggggataaatgcaaatttcacgcagtataacggaaaacaaaaatgttacaggtatacctcgttcgccatggcgaaacggaatggaacgcggctcgccgcatccagggtcagtccgacagcccgttaaccgccatgggtgaacaccaggcccgtctggtcgccaggcgcgtcagcaaagaaggcattacgcacatcattaccagcgatctggggcgcacgcgccgcaccgcacagatcatcgccgacgcctgtggctgcgaagtgattagcgatccgcgtttgcgtgagctgcacatgggggttctggaagaacgcctgatcgacagtttgacgccgcaggaagagcagtggcgcaaacagatggtcgatggtactcctgacggtcgaatccctcaaggcgaatccatggaggagctgggcgagcgcatgcgcgccgcgctggagagttgcctgatgctgcctgaaggcagcaagccgctgctcgtcagtcatggtatcgcgttggggtgtttgatcagtacggtgctggggctgccggcctatgcggaacgccgcctgcgcttgcgcaattgctcactgtcgcgcgtcgatcaccagcagagcccgtggttggcttccggctggatcgtggaaacggcgggcgatgtcacgcatttggacatgcccgcgttggacgaactgcagcgttaacgccgaatcgggatcaggtaatcgcacttgatctcgataggtgcctgatgcggacggcgctcgcctttcggatagaagcgctcgatgtcgtgccctttgcggcgcgtcagctggagcgccggcaggcaggtgccgtagaccgtcagaataaagtcttgcagtccctcggtgggcccttcgtagctgaacatcgcaaactcaccgcccggcaacaccagcggctggccttcctgtaccttgtcaggcacctgatccggctccagcgccgtggtgtacagcacttcctgttcgtcgtccttctcctggctcggtcgcgagtggtgcagcccgtacagcaccggcggcagggtttcgacgtcaccgaggaactgacgccagaactgtgagcgcagttcggtgcgcacggtggtgatctgttccagcgtacaggagtagctttgagtcaggccgaccagctgcttgtccggcagcgagacgaattccggctgcggcaaggtgaaggctcccagacggatcggcggacagatgccgaatgcattccagtcttcggcgcggcggtacagcgccggcgtttgcgcaaactgttttttgaaggcgcgcgtgaaggtctgctgcgagtcgaagcgatattgcagggcgatatccaaaatcggccggctggtcaaacgcagcgcgacggcggctttggacagcctccttgcccggatgtaagcaccgatggcgttaccggtaatatctttgaacatccgttgcagatgccatttggagtagcctgccttggccgccacgttatccagcgacaagggttggtccaaatggctttccagccagctaagcagatcacgaatgataccggcttgatccatagatcttcctcgtaaagcttgggggtaggaacccgaactgttgattcgtcacgctggtgctgcgctatcagaccgatccatgagccattatgcgttgcactctttgcctctgctgcgcatgccgcgccagagttggattggggtacaccgtagtgggcgcaaagaaataacgacgccgcatcatagcaatttttttactccgcgactctcaaagatttttgtcacgctctgtgctaaaacggacggtgcggacccgtaaaaaaccgattccgtgagcttagacataaataatggcgaccgccgaacctatttttgcggcaaggttataccggagttaagtaaatgaaaaaaagctggatatttttattcggtttggtttgcgcaaccgttggcagcgcgcaggcggagcaggtgggctccgttgatacggtgtttaaattgttggggccagaccacaaaatcgtagtggaagcgttcgacgatccggatgttaaaaatgtaacttgttatatcagccgcgccaaaaccggcggcatcaaaggcggcttggggctggcggaagacaccgccgacgcggccatttcctgccagcaggtggggcctatcgagctgagcgacaagatcaaaaacggcaaggcggaaggcgatgtggtgttccagaaacgcacctcgctggtgttcaagaagttgcaggtggtgcgcttctatgacgccaagcgcaattcgttgatttacctgagctactccgacaaggtgatcgacggttcgccgaagaacgcgttgagcgcggtgccgatcatgccatgggctgagacgaaataaaaaaacggggttcagcatgctgaaccccgttttcatgacggcaggccggaattactcttccagatcgccgcagaagcggtagccttcgccgtgaatggtggcgatgatttccggcgtatccggcgtcgattcgaagtgtttgcgaatgcgacggatagtgacgtccacggtgcggtcatgcggcttcagctcgcggccggtcattttcttcagcagttcgccgcgcgactggatcttgcccgggttttcgcagaagtgcagcatggcgcggaattcgctgcgcggcagcttgtactgttcgccggccgggctgatcaaagagcggctgttgatgtccagctcccacccgttgaacttgtagctctcgaccagacggcgctcttcgccgaggctgcccaggttcatggtgcgcgacagcaggttgcgcgcgcggatggtcagctcacgcgggttgaacggcttggtgatgtaatcgtcggcgccgatttccaggccgaggattttgtccacttcgttatcgcgaccggtcaggaacatcaaggctacgctggcctgttcacgcagttcgcgcgccaacagcaggccgtttttgcctggcaggttgatgtccatgatgaccagattgatatcattttcagacaggatattgtgcatctctgcaccatcattggcttcatgaacaatgtagccttccgcctcgaaaatgctcttcagggtgttacgagtgactaactcgtcttcgacaatcagaatgtgcggggtctgcatatttgctacctaaaattgccaacaaaatagaaaatcggaagtacagaagtctttgttttcttagaggagggcagagatagcgccacgttccctctcagcaaatgactaaagtacgtaaactcgttcttgatgcactttccatctcatgtcaacaagatcgctagcctggtggggatgctgttccctacaaccccttgggtgccgaaacggcgcatatcctaaccccattaacagcaatataacagcgcgtgccgaattcatcacccaacaaaactacgctttgttgacatatatcaaattcaattgtagcacgttaacagatttgtgaaaaacacttacagaaatgccagtttaagtcacagaacctcaaattctgtgaacgattcagcattctccggcacgataggatacaattattcgcttattgatcatcgcattgttttaacttattgataaataaaagcagtaaaacataagcgcgaataatgactattacgacgggtttattagttcaacgagccgtttaatcttgtttgttgctattaacgcgtttattgttgcgtaattgtaaatataagcgggcgctgcgccatcgtcaaaaacgcaggcccgccttcggtggaagagtcatgcagcttcatattgttttagtggctccggcgcggccggaaaatgtcggcgcggcggcgcgcgcgatgaaaaccatgggcttcacgtcgttgcgcatcgtcgacagcgaagcgcacctgcagccggcggcgcgctgggtggcgcacggtgccggtgagatcctcgacggcgtgcaaacgttcgccacgctggaacaggcgctggcgggcgtggattttaccgtcgccaccaccgcccgcagccgcgcgcgctttcactactactgtacgccgcccgaactgctggaacagctgagcgagcgtaagcagtgggtcggccaggccgcgctggtgttcggccgcgaagattccggcctgaccaacgaagagctggcgctggcggacttgctgaccggcgtgccgatgcaggcggactatccgtcgcttaacctgggccaggcggtgatggtttactgctaccagctggcgagcctgatgggtgtcagtacaccgcaggaaacggcggcgtcggaagggcagctcaaggcgctgcgccgccgcgccgatgccttgttgaacgcgttggaggtcggcgatgaccaaaaattgcgcgactggctgcaccagcgcctcggcgcgctgcaacagcgagatacggcgatgctgcatacgctgctgcacgatatcgaaaaaaaactcgccaagtgatagcggctccatcagacggttacccagcgtgatccactagtaaataggctttaagttgtttttttgttctgtcattttgcttttcacctgttgcatcgcgcattaccgccgctgaacggaaaataagcaaaaaaaagaaatagtttgacttgggatagcgattgctttaaccaatagaggggacagagtatttcatgagacagacagacaacatgcgcaacatcagcctgaaaaccacaattattaccaccaccgataccacaggtaacggggcgggctgacgcgcacaggaaacacagaaaaaagcccgcacctaatcagtgcgggcttttttttcggcttaaattcggagagatcacacatgcgagtgctgaaatttggcggaacctcggtggcgaatgcagaacgttttctgcgcgtcgccgacatcatggagagtaatgcgcgtcagggacaggtagccacggtcttgtccgcccccgcaaagatcaccaaccatctggtggcaatgatcgacaaaacggtggcgggccaggacattctgccgaatatcagcgacgccgagcggatctttgccgacctgctgagcggcctggcgcaggcgctgccgggctttgaatacgatcgtttgaaaggcgtggtcgatcaggagttcgcgcagctcaaacaggtgttgcacggggtctcgctgttgggtcagtgcccggacagcgtcaacgcggcgatcatctgccgcggcgaaaagctctccatcgccatcatggaaggggtgttccgcgccaagggttatccggtcacggtgatcaacccggtggagaaactgctggcgcagggccactacctggagtctaccgtggatatcgccgagtccacgctgcgcatcgccgccgcggcgatcccggccgaccacatcgtgctgatggccggtttcaccgccggtaacgacaagggtgagctggtggtactgggccgcaacggctccgactattccgccgcggtgctggccgcctgcctgcgtgccgactgttgcgaaatctggaccgacgtcgacggcgtgtatacctgcgatccgcgcaccgtgccggacgccaggctgctgaaatcgatgtcgtaccaggaggcgatggagctttcctatttcggcgccaaagtgctgcaccctcgcaccatcacgccgattgcccaattccaaattccttgcctgataaaaaacacctccaacccgcaggctcccggcacgctgatcggcaaagacagcaccgatgccgatatgccggtgaaaggcatcaccaacctgaataatatggcgatgatcaacgtctccggcccgggcatgaaaggcatggtcggcatggccgcacgggtgttcgccgtgatgtcgcgcgccggcatttcggtggtgctgatcacccaatcctcttccgaatacagcatcagcttctgcgtgccgcagggtgaactgcagcgcgcccgccgcgcgctggaagaggagttctatctggagctgaaagacggcgtgctggatccgctggacgtcatggagcgcctggcgatcatctcggtggtcggcgacggcatgcgcaccctgcgcggcatttccgctcgcttcttctccgcgctggcgcgcgccaacatcaatatcgtcgccatcgcccagggctcttccgagcgttcaatctcggtggtggtcagcaatgattccgccactaccggcgtgcgcgtcagccaccagatgctgttcaacaccgatcaggtgatcgaagtgttcgtcatcggcgtcggcggcgtcggcggggcgctgatcgagcagatctaccgccagcagccgtggctgaagcaaaaacatatcgacctgcgggtgtgcggcatcgccaactcgcgcgtgatgctgaccaacgtgcacggcatcgcgctggacagctggcgggacgagctggccggcgcgcaggagccgttcaatctcggccgcctgatccggctggtgaaggagtatcacctgctgaacccggtgatcgtcgactgtacctccagccaggcggtggccgatcagtatgtggacttcctggcggacggcttccatgtggtaacgccgaacaaaaaggccaacacctcgtcgatgaactattatcagcaactgcgcgccgccgccgccggttcgcaccgcaagttcctctacgacaccaacgtcggcgccggtctgccggtgatcgagaacctgcaaaacctgctgaacgccggcgatgagctggtgcgtttctccggcatcctgtccggttcgctgtcctttatttttggcaagctggatgaagggctgtcgctgtcggcggcgactctgcaggccagagccaatggctacaccgagccggatccgcgcgacgatctgtccggtatggacgtggcgcgcaagctgctgatcctggcgcgcgaagccggttacaagctggagctgagcgatatcgaggtcgagccggtgctgccgccgtccttcgacgcgtcgggcgacgtggagcatttcctggcgcggctgccggaactggataaagagttcgcgcgcaacgtggccaatgccgccgagcaaggcaaggtgctgcgctatgtcggcctgatcgacgaagggcgctgtaaggtgcgcatcgaggcggtggacggcaacgatccgttgtataaagtgaagaacggcgagaacgcgctggccttctacagccgttattatcagccgctgccgctggtgctgcgcggctacggcgccggtaacgatgtgaccgcagcgggcgtgttcgccgatctgctgcgcacactgtcatggaagttgggagtttaatatggttaaggtgtatgcaccggcctcgatcggtaacgtcagcgtcggttttgatgtgctgggcgcggcggtttcgccgatcgacggcacgctgctgggcgactgcgtcagcgtggaagccgccgagacgttcagtctgcaaaacgccgggcgcttcgtcagcaagctgccggccgagccgaaagagaacatcgtttatcaatgctgggagcgtttctgccaggagatcggccgcgaagtgccggtggcgatgcggctggaaaagaacatgccgatcggatcggggctgggctccagcgcttgttcggtggtggccgggctgatggcgatgaacgaattttgcgatcgcccgctggataagacgacgctgctcggtctgatgggcgagctggaaggccgcatttccggcagcgtgcattacgacaacgtggcgccctgctatctgggcggcctgcagctgatgctggaagaagaaggcattatcagccaggaagtgccgtgctttgacgattggctgtgggttatggcctatccgggcatcaaggtctccaccgccgaagcgcgcgccattttacccgcgcagtaccgccgtcaggattgcatcagccacggccgctatctggccggctttattcacgcctgccacacccggcagccgcagctggccgccaaattgatgcaggacgtgatcgccgagccgtaccgcacccggctgctgccgggcttcgccgaagcgcgcaaggcggcgcaggagatcggcgcgctggcctgcggcatctccggctccggcccgacgctgttcgccgtctgcaacgacggcgccaccgcgcaacgcatggccgcctggctgcaacaacactatctgcaaaacgacgaaggttttgttcatatttgccgtctggataccgcaggcgctcgactattgggataacgcatgaaactgtacaaccttaaggatcacaacgagcaggtcagcttcgcgcaggcgatcaaacaaggcctgggcaagcagcaggggctgttcttcccgctggagctgccggcgttcgaactgaccgagatcgaccagctgctggagcaggactttgtcacccgcagcagccgcattctgtcggcctttatcggcgaagaagtgccggaagcggcgctgaagaaacgcgtacaggccgcctttgagtttccggcgccggtagcgaaagtgacggaagacgtctcctgcctggagctgttccacggcccgacgctggcgttcaaagacttcggcggccgctttatggcgcagatgctggcggaagtggccggcgatcagccagtgaccattttgaccgccacctccggcgacaccggcgccgccgtggcgcacgccttctatggcctgaagaacgttcgggtggtgatcctttacccgcagggcaaaatcagcccgctgcaggaaaagctgttctgcaccctgggcggcaatattcacaccgtggcgatcgacggcgacttcgacgcctgtcaggcgctggtgaaacaggcgttcgacgatcaggaattgaaagacgcgctgcacctgaactcggccaactcgatcaacatcagtcgcttgctggcgcagatttgctactacttcgaagcggtggcgcagctgccgcaggaagcgcgcaatcagctggtgatttcggtgccgagcggcaacttcggcgatctgaccgccgggctgctggccaaatcgctgggcttgccggtgaagcgcttcatcgccgccaccaacgccaacgacaccgtgccgcgcttcctgaccagcggccagtggcagccgcacgctacggtcgcgacgctgtccaacgccatggacgtgagccagccgaacaactggccgcgcgtggaagagctgttccgtcgtaaggtctggcaactgaaagagctggggcacgcggcggtcagcgacgagaccaccaaagacaccatgcgtgaactggccgagctgggctatatctccgaaccgcatgcggccatcgcttaccgcgcgctgcgcgatcagctgcaggaaggggagttcgggctgttcctcggcacggcgcatccggccaagtttaaagagagcgtggaagcgatcctcggccaggaactgccgttgccgaaagcgctggcgctgcgggccgatctgccgctgctgtcgcacacgctgccggccagtttcggcgagctgcgcaaattcctgatggcgctgccggcctgaagttcggcaggctagaaggcgaaaagccgtcttgcgacggctttttttatgcctgctccgggcgtttgaacaccagctcattgccttgcgaagcggcttcgtcgaaggcgtagccttccaggttgaagtccgccagctgctcgctgcgcgtcaggcggtttttgatgataaagcggctcatcaacccgcgcgctttcttggcgtagaagctgatgaccttgaacttgccgttcttctcgtcgaggaacaccggtttgatcagcgagccgtgcagcttggccggcttcaccgctttgaaatactcgtctgacgccaggttgaccaccacgtcgtcgccctgttgctccagcgcttcgttgagcttttgggtgatctgatcgccccagaagctgtacagatctttgcccttcgggttttccagcttgatgcccatctccagccggtacggcatcatcagatcgagcggccgcagcacgccatacaggccggacagcatgcgcagatgctgctgggcgaagtcgaaatcggcttcgttgaaatcctgcgcctgcaggccggtgtaaacgtcgcccttgaacgccagcagcgcctggcgggcgttgtccggggtaaatttcggctgccattcgctaaagcgcgcggcgttgagcccggccagcttgtcgctgatgctcatcaggctggcgatttgcgccggcgtcagcgcgcggcaaattttgataagccgctgagatttgtccagcagttcgggctgcgtgaagcgttctgtcgccagcgggctgtcgtaatcgagcgtttttgcaggggaaataataacgagcatggccagatcctgtttatccaagtgcgcatactgtagcaaaaagcgcggaaaaaaggggcaatcagtccaataggcggggcgtgcatcgcacacgccccggaatactcagcgcggcggctgcttgtcgtcccacacgcccggctccagctgcgatttcagctccggataacggttggcatcgaaggtcggcagcttgcccaggcggcgctggcgatggtagtcgtcggccagcttcagcgccacccgcgacagcagcaggatcgccgtcaggttggtgatcgccatcagcgccatggaggtatccgccattttccacaccagcggcagctccgccagcgcgccgaacatcaccatgcctagtgccacgcagcggaaaatcagcaggccgcccggatgattgtgttcgaggaacaccaggttgctctcggcataggcgtagttggcgatgatcgaggtaaaggcgaagaagaagatggcgatagcgacgaacggcgtgccccaactgccgacggcggtcgacagcgcgcgctgggtcagatcgatgccgctgatgctgtcggtcggctgatcgagaatgccggaggagaggatgatcgccgcggtggcgctgcagatgacgatggtgtcgataaataccccgagcatctgcacgtagccctgtgaagcgggatgcggcggataaggcgaggcggacgccgccgcgttgggcgccgatcccatgccggcttcattggagaacaggccgcgctgcacgccctgggtcatcgcctgggagataccgtaaccgacggcgccggccgcggcttcctgcaggccgaaggcgcttttgaagatcagcgtcaggatcgccggcatgtgctcgatgttatggccaatcacccagagagccagcagcaggtaggcgccggccatcagcggcaccaccagctcggccactttggcgatggagcggatgccgccgaagatcaccacgccgctcagcagcaccagaccgatgccgacgtgcagcggctgtaagtggaaggcgacggccgaagcttgcgcgatggagttggcctgcacggcgttgaacaccagaccgaatgcgatgatcaggaagatcgaaaacagcacgcccatccagcgcatgccaaggcctttttccatgtaataggccgggccgccacggtagttgccgttatcgtctttggttttatagagctgagccagcgagctttccacaaatgaggtggccatgccgataaacgccaccacccacatccagaagatggcgccggggccgccggcggtcagggcgatggcgacgccggtcaggttgccggtgccgacgcgtgctgccagcgtggtgcacagcgcctggaaagaggagatgccggcgctgtcgcttttattgctgtttttcaacaccgagaacatgtggctgaagtggcggagctggataaagcgggtgcgcagcgtgaagtaaatgccggtgccgagcagcagataaatcagcaccgacccccacaaaatgttgtttataaaattcatcaggtccgtcaatggatccctcctcttatcgaaatttaatgcgcaccttgcagcatccaccgcaggtgaaaaacattggcctattttttacaagagcttagctggaatctgtccggcgtcagtcgattaagatttttcgcagattagcggacggattgcatcaattttttcgaatttaacataatttattcggacaatagcacgttattgcctttccatccgctcggtaatggcgaaagatatcggcgtaaacggttgctcgcccaaggataaaacagatgcttgtgcgccgcggttttccagccttgcaccgggcttggcgcatgttattatcagggtagggcatggttgaacaatgccaaaagttcatgcacaaacgatgagataatgccaacatgaccgacaaattaacttccctgcgccagctgaccacggtggttgcagatacgggtgatatcgcggcaatgaagctgtatcaaccgcaggacgccacaaccaacccttcgctgatcctcaatgcagcccaaattcctgaataccgcaaactgattgacgaagccatcgcctgggcgcgcggccagagcagcgatcgcgagcagcaaatcgccgatgccgccgacaagctggcggtcaacatcggtctggagatcctcaaactggttccgggccgcatctccaccgaagtggatgcacgcctgtcttacgacaccgttgccagcgtggccaaggccaagcgcctgatcaagctgtacaacgaagccggcatcagcaacgatcgcattctgatcaaactggcctcgacctggcagggcatccgcgcggcggagcagctggagaaagaaggcatcaactgtaacctgacgctgctgttctccttcgctcaggctcgcgcctgtgccgaagccggcgtttacctgatctcgccgttcgtcggccgtatcctcgactggtacaaagccaacggcgacaagaaagagttcgccccgcacgaagatccgggcgtgatctccgtgaccgaaatttaccagtattacaaacagcacggctacaacaccgtggtgatgggcgccagcttccgcaacgtcggcgaaatcatcgaactggccggctgcgaccgcctgaccatcgcccctgcgctgctgaaagagctggcggagagcgaaggcgcgctggagcgcaaactgtcttataccggtgaagtgaaggcgcgtcctgccgcactgaccgaacctgagttctactggcagcacaaccaggatccgatggcggtcgagaaactgaccgacggcatccgcaagttcgccgtagaccagggcaaactggaaaaaatgatcgccgacctgctgtaattcccgcagatcgcgcagtaaaaaggtggctcaggccacctttttttatgcccgacgcccctgccggcgggggaagcccttatactctcggcaatgacaacagaacgggggacgagcccgttcggaccccatcaggctgtagaggttacgcatggatattttacgtattggtttggtttccgtttccgaccgcgcttccggcggcgtttaccaggataaaggcattccggcgctggaggagtggctggccggcgcgctggcgacgccgttcaagctggaaacccggctgatccccgatgagcagacgcaaatagaacagacgctgtgcgagctggtggacgaaatgggctgccatctggtgctgaccactggcggcaccgggccggcgcgccgtgatgtcacccccgacgccacgctggcgatcgccgatcgcgtgatgcccggcttcggcgagcaaatgcgtcagatcagcctacactatgtgccaacggcaattctttctcgccaggtgggggcgatccgcaaacaggcgctgatcatcaacctgcccggccaaccgaagtcgatcaaggaaacgctggaaggggtaaaggatgagcagggcaatgcggtggtgcacggcatcttcgccagcgtgccttactgcattcagctgctcgacgggccttacgtcgaaacgcatgccgcagtggtagcagcatttcggccaaagagcgcgcgtcgcgagataaacctctaaatttcagcaatctgcgagatcggcttcaacccgtctggtgtgaaaataatttgccgctatagtaaggattcttttacagaaagcctgcggcttttatttttacagcctttaccgacggtgccctatgcctcacgacactaatcgccggctgaaccggcaagactacaaaacgctgacgttggccgcgttgggcggcgcgttggagttttacgacttcatcatcttcgtgttcttcgccgccgtggtcggcgatctgttcttcccggcggacatgccggaatggctgcggctggtgcaaaccttcggtatcttcgccgccggctatctggcccgcccgctgggcggcatcgtgatggcgcacttcggcgatctggtcggccgcaaaaagatgtttaccctgagcattctgctgatggcgttgccgacgctggcgatgggcctgctgccgacctacgccagcatcggcatcgccgcgccgctgttgctgctgctgatgcgcgtgctgcagggggcggcgatcggcggtgaggtgccgggtgcctgggtcttcgtcgccgaacacgtgccgcgccggcgcatcggcttcgcctgcggcacgctgaccgccgggctgacggtgggcatcctgctgggctcggtggtggcgacggtgatcaacaccacgctcagcccgcagagcattgccggcggcggctggcgtattccattcctgcttggcggcatgttcggcctggtggcgatgtacctgcgccgctggctgcaggaaacgccgatctttatcgagatgcaggcgcgtaaagcgctggccgaggagctgccgctgaaatcggtggtgctcaactacaaacgggaagtggcggtgtcgatgctgctgacctggctgctctccgccggcatcgtggtggtgatcctgatgaccccgacctatctgcaaaagcagttcggcatcgcgccggccttgacgctgcaggccaacagcatcgccaccatcatgttgatcgccggctgcatcgtcgccggtttgtcggccgatcgcttcggtgccagcaaaacgctggtggtcggcagtgtactgctggccggctgcagctggctgttctatcagacggtgggcgtgcgcccggaaatgctgttcgcctgttatgctctggtggggttcagcgtaggcgtggtgggggccgtaccgtacgtgatggtgcgggcattcccggcggaagtgcggtttaccggtatctcgttctcatataacgtctcgtacgctatttttggcggtttaacccctatttttgtgacgttgatcatgaaattaaccccgttagcgcccgcttactatgtgttggcgctgtcgctcatcgggctgctgctcggcttctacctgcatcgtgacctgaacagcgaagccggggagcggcgagccgattcctacagctaaaaaaaagccctgcagtgcagggctttttcatcaggggcgggcgattacgccgtgaccggtgaggccgcgacgcgcgccggagccggttcgccaatcggcagcacggtgcggccatactgctcgttgagtacttcggccatcgccaggtaaatggcgctggcgccgcagataatcccttcatagccggcgaaggtcagcagcgtgtggttgccggtgatgttgccgacggccagcagggcgaacagcagcgtcaggctggcgaacacgaactgcagcacgcggttggcgcccagggtgccgaagaacatgaacagggtgaagacgccccacagcgccaggtagatgcccagcacgtgggcctcggtggcctctgccaggcccagacgcggcagcagcagcaggccgaccaggctcagccagaagctgccgtaggcggtgaaggcggtcatgccgaaggtgttgcccttcttgtactccagcagtccggccaggatctgtgccaggccaccgaagaaaatccccatgctgatgatggcggagttcagtgggaaaaagcccgcgttgtgcaggttcagcaagacggtggtcatcccgaagcccatcaggccgagagggccgggattcgccaacttgttggtgtgcataagtcctctgcgataacagaaaattaacggaaacagcgaattaaaatcataaatggtctgaatggccaaaaaatcgaagttttccaccagagcgcgcgcatcataatgatccccgcaaccggaaacaatgatctgaatgacgataaaaaaagaaatttttttcgccttgccccttgatgccgggttggatggccccatcttatttgcaaccgcagctgctaaccgcgggtcgcactgagatatcgggcagttgaaaagcaaaaaatcgcccgcatataggttagcaacctgactgattatgaattttttagtggagacgtttagatgggcaaaattattggtatcgacctgggtacgaccaactcttgcgtagcaattatggatggtgccaaggcacgcgtgctggaaaacgccgagggcgaccgcaccactccttctattatcgcatatacccaggacggtgaaactctggttggccagccggctaagcgtcaggcagtcaccaaccctgaaaacaccctgttcgccatcaagcgcctgatcggtcgccgcttccaggatgaagaagcgcagcgcgacaaagcgatcatgccgtacaaaatcgtcgaagccgacaacggcgacgcctggctggaagtgaaaggccagaaaatggctccgccgcagatctctgcggaagtgctgaaaaaaatgaagaaaacggcggaagattacctgggcgaaccggtaactgaagcggttatcaccgtaccggcttacttcaacgacgcccagcgtcaggcgaccaaagacgccggccgcatcgcgggtctggaagtcaagcgcatcatcaacgaaccgaccgcggcggccctggcctatggcctggacaaagaagtcggcaaccgcaccatcgcggtttatgacctgggcggcggtactttcgatatctccatcatcgaaatcgacgacgttgacggcgaaaaaaccttcgaagtgctggcgaccaacggtgacacccacctgggtggcgaagacttcgacagccgtctgatcaactacctggtggaagagttcaagaaagatcagggcatcgatctgcgcaacgatccgctggcgatgcagcgtctgaaagaagccgctgagaaagcgaagatcgaactgtcttccgctcagcagaccgacgttaacctgccgtacatcactgcagacgcgaccggtccaaaacacatgaacatcaaagtgactcgcgccaaactcgagtcgctggttgaagatttggtggcgcgctccatcgagccgctgaaagtggcgctgaaagacgcaggcctgtcggtttccgacatccaggacgtgatcctggtgggcggccagacccgtatgccaatggtgcagaagaaagtcgcagacttcttcggcaaagagccgcgcaaagacgtgaacccggacgaagcggttgccgtgggcgctgcggtacagggcggcgtgttggccggtgatgtgaaagacgttctgctgctggacgtgaccccgctgtcgctgggtatcgaaaccatgggcagcgtgatgacgccgctgatcaccaaaaacaccactatcccgaccaagcacagccaggtgttctctactgcggaagacaaccagtctgcggtaaccatccacgtgctgcagggtgagcgtaagcgcgccagcgataacaaatctctgggccagttcaacctggacggcatccaggcggcgccgcgcggcatggcgcagatcgaagtgaccttcgatatcgatgccgacggcatcctgcacgtgtctgccaaagacaagaacaccggccgtgagcagaagatcaccatcaaggcatcttctggcctgaacgaagacgaaatccagaaaatggtgcgcgacgccgagctgaacgctgaagctgaccgcaagtttgaagagctggtacagactcgcaaccaggcggatcacctgatccacggcacgcgcaaacagctggaagaagcgggcgacaaactgccggcggaagacaaaacggcgatcgaagcggcgctgaaagatctggaagcggcggtgaaaggcgaagataaagccgagatcgaagcgaagacccaggcgttggtgcaggtttccggcaagctgctggaaatggctcaggcgcagcaggctcagcagggtgctgacgccggcgcggacaacgcggcgcagaaagacgacgacgtggttgacgccgagttcgaagaagttaaagacaaaaaataatcgcccttaagcgggcacggggcggccgaggtgccgctcccggaaaccagcacgggcgtcgaggcaactctgcgcccgtgcacgcatgttaagggtaagcgaaagaatggcgaagaaagactattacgagattctcggcgtcagcaagacggcggatgaacgtgagatcaaaaaggcgtacaaacgcctggcgatgaaataccatcctgaccgcaaccaggaacaagacgccgaaaccaagtttaaagaagttaaagaagcttacgaagtcctgaccgacgatcagaaacgcgcggcctacgaccagtatgggcacgcggcctttgagcagggcggcatgggcggcggcggctttggcggcggcgccgacttcagcgatatctttggcgacgtgtttggcgacatcttcggcggaggccgccgtcagcgcgccagccgcggttccgatctgcgctataacatggagctgaccctcgaggaagcggtacgtggcgtcaccaaagagatccgcatcccgacgctggaagagtgcgacgtctgccacggcagcggcgccaaaccgggcagttcgccggtcacctgtccaacctgtcacggccagggccaggtgcagatgcgtcagggcttcttcaccgtgcagcaggcgtgtccgcactgccatggccgcggccagatcatcaaagatccgtgcaacaagtgccacggccacggccgggtagaaaaatccaaaacgctgtcggtgaaaattccggccggcgtggataccggcgatcgtatccgcctggcgggtgaaggcgaagccggcgagcacggcgcaccggcgggcgatctgtacgttcaggtgcaggtgaaggcgcacccgatctttgagcgtgaaggcaacaacctgtactgtgaagtgccgatcaacttcgccatggcggcgctgggcggcgagattgaagtgccgacgctggacggccgggtgaaactgaaggtgccttcggagacccaaaccggcaagctgttccgcatgcgcggcaagggcgtgaaatcggtgcgtggcggcagccagggcgacctgctgtgccgcgtggtggtggaaaccccggtcaatctgaacgacaagcaaaagcagctgctgcgtgagctggaagagagcctgggtggcccgtccggcgacaagaacagcccgcgctcgaagagcttcttcgacggggtgaaaaagttctttgacgatctgactcgctaacctgctgtttctgttggtttatgtgcgaaccccgggcatctgtcccggggtttttatttgcgcgctaaaccgctaattccacaacgtaaatgtgacttattcgtgctttttatcggttttttcgagctatttagcatttataaacttattttttcgaactaaaacgccctctatactcacttcatgactgtggttcgcagggcgctatgtcctgcacagatttggagagacgtactgtgaccaacatcattcgtcaatttttacgtcaggaagccgcgggcggtatcattctgatcgcggcggcgatcgtcgccctgatcatggccaacaccccggcgcaggggatctatcaggcattccttaacctgccggtgatggtgaaggtagcttcgctggagatcgctaaaccgctgctgctgtggataaacgacggcctgatggccatcttcttcctggtggtggggctggaggtcaagcgcgagctgatgcaaggctcgctgtccgggcgcgacaaagcggtgtttccggcgatcgccgcgctgggcggcatgttggcgccggcgctgatttacctgctgttcaacggcgcggatgaagttacccgccagggttgggcgatcccggccgcgaccgacatcgcctttgcgctgggcgtcatggcgctgctgggcaaccgcgtgccaaccagcctgaaagtgttcctgttggcgctggcgatcatcgatgacctgggcgtgatcatcatcatcgcgctgttctacacccacgaagtgtcgatggtggcgctgggcgtggcggcggcggcgacggcgctgctggcggtgatgaactggcgcggcgtgggcaagacctcgctgtacatgatggtcggcctggtgctgtgggtggcgatcctcaagtccggggtgcatgcgacgctggccggggtgattgtcggctttatgatcccgttgaacgtcaaaaaggggccatcgccgtcggaaacgctggagcatgagctgcacccttgggtggcgttcatgatcctgccgctgttcgctttcgccaacgccggggtctctttgcagggcgtatcgctggagggattgacgtcgctgctgccggtcgggattgcggctggcctgtttatcggcaagccgctggggattttcctcttcagcctgctggcggtgaaaatgggcatcgcccgtttgcctgaaggtatcggcttcaaacaggtgtttgccgtttcggtgctttgcggcattggttttaccatgtcgatttttatcgcctcgctggcgttcggcgatgcggatgcggcgctcagcacctattcccgcctggggatcctgttgggctccaccactgcggcggtggtagggtatggattactgcgtctggcgttgccgcgcgtgcgttaatcctgaatgtgcccggtaagggcacataataaaatggctggtcggagctgtacggtataaaatatgtgcagcttcggccgttcttcgttgggactaatggggctatacgttgtctgaagcagggaaaggaagtttgtcgctcgtcacggcacaccgtttgccgctgcgaaacgttgttaaggagagccgctcgtgaggatgtcgcatatcaactttaatcacctttactatttctggcaggtctgcaaggccggttccgtggtcggtgccgccgaagcgttgtttctgacgccgcagaccatcaccggccagatcaaagcgctggaagagcggttggacggcaagctgttcaaacgccaggggcgcgggttggtgccttcggagctggggcagctggtgttccgctatgccgacaagatgttcatgctcagccaggaaatgctggatatcgtcaactaccgcaaagagtccaacctgttgttcgacgtcggcgtggcggacgcgctgtcgaagcggctggtcagccaggtattggaaacggcggtggtggtggacaacgagcagatccacctgcgttgctttgaatcgacgcacgagatgctgctggagcagctcagccagcacaagctggatatgatcctgtcggattgcccggtggactccagccagcaggaagggctgttctcgctgaagctgggcgagtgcggcatcagctttttctgtcgccagccggcgccggagctgccgtttccggcctgtctggagcagcgcaagctgctgatccccggccgtcgttcgatgttggggcgcaagctgctcaactggttcaatacgcagggtattcaggtggaaattctgggcgagttcgacgatgcggcgctgatgaaggccttcggcatgtaccacaatgcgatcttcgtggcgccgacgctgtatgcgcaggatacctacaacgatgacaacgtggtggagattgggcgcatcgacagcgtgcaggaggagtattacatcatcttcgccgagcgcatgatccagcatccggcggtgcagcgcgtctgcaacaaagacttctcggcgctgttttcctgctagcggttcactgaacgcaggacgtaaaaaaaccggcctgagccggtttttttatcaagcagataacgaaatgcttattgcattgcgttgatgcgtgcagtcaggtttgacttatgacgcgctgctttgtttttgtggatcaggcctttagctgcctgacggtccaccagtggctgcattaccaggaatgcattttgtgctgcttctttgtcgccagctgcgatagctgcgtctaccttcttgatgaaggtacgcaccattgagcgacggcttgcgttatgcttgcggcgtttctcagactgtacggcgcgtttcttagctgatttgatattagccaaggtccaactcccaaatatattctattgaggacaattcaaaggccgaggaatatgcccttttagccttcgtttgtcaatggatttgtgcaaataagcgccgtttgtacaggcggcactcgctacgttgtgatggcgcaggattttaccagcttcgctcttgggaatacagtgtttcgcgagaaaattcgccaatgatttgccgcggcgggcgcaagccgttggccgcggtcgagaatcgccccggcagcgccggataaactgtggcgaagccgtttcacgcacagattatctccggtatggtatgtctattacataaaggcaccaatcgcgggttaaccttaccggctgtacaaggtataatccgccgatttccactgttttgagccagctatggagctaattcgcggcattcacaatatccgggcgcgccaccatggttgcgtgctcaccatcggcaactttgacggcgtgcatcgcggccatcaggcgttgctggaacagttgaagcaacaggggaaacgcctcgggctgccggtgatggtcatgatctttgagccgcagccgctggagatgttcgccgcagacaaagcgccggcccgcttgacgcgcctgcgcgacaaggccaactatctggcgcaggcgggcgtcgattacctgctgtgcgtcaagttcgatccgcgtttcgccgccaacaccgcgcaggcgttcgtcgccgagctgctggtggaaaaactgggcgtcaaattcctgatggtgggggatgattttcgctttggcgccgggcgtcagggcgattttccgctattgcagcaggccggaaaagagtacggcttcgacgtggtcagcaccccgaccttccgcgaaggcgagcggcgcatcagcagcaccgcgatccgcaccgcgctgagcgaggacgatctgccgctggcggagaccctgctgggccacccgtacagcatttccgggcgcgtggtgcacggcgacgagctggggcgcaccatcggcttcccgactgccaatttgccgctcaagcgtctggtggcaccggtgaaaggagtgtatgcggtggaagtgtacggcctggggcctaagccgctgccgggcgtggccaatatcggcacgcgcccgaccgtcgccggcgtgcgccagcagctggaagtgcatctgctggatgtcacaatggatctttacgggcgccatattgaggtggtgctccgcgcaaaattgcgcaatgaacagcggtttgcttcgctcgatgccctgaagcagcaaatcgccaatgatgtggtgacggcccggaagttcttcgggttaaaaacactggtttaatcgtttaccctaaacaattcgagttgcatcgcggcggcaaccgcgcgaaccccgatgagcttgcataggcaagtgattcgggtgagaaagggcggccgacaaagatgcagcttgaagtgtgacgggtaaatagccgaaaacggaaacgagaatctcatgagtgactacaagaataccctgaacttgccggaaacagggttcccgatgcgcggcgatctcgccaagcgcgaacctggcatgctgcaacgttggtatgaacaggatctgtacgggattattcgtactgccaaaaagggcaaaaaaaccttcattttgcatgacggccctccgtatgcgaacggcagcattcacattggtcactcggttaacaagattctcaaagacattatcatcaagtcgaaagggatggccggcttcgactcgccttatgtgccgggttgggactgccacggcctgccgatcgaactgaaggttgagcaactgtacggcaagccgggcgagaagctgacggcggccgagttccgccagaagtgccgcgagtacgcggccgagcaggttgaaggccagaagaaggacttcatccgtctgggcgtgttgggcgactgggatcgtccgtacctgacgatggacttcaaaaccgaagccaacatcatccgcgcgctgggcaagatcatcagcaacggccacctgctgaaaggcgccaagccggttcactggtgcaccgactgcggctcgtcgctggcggaagcggaagtggagtactacgacaagacttcgccgtcgatcgacgtgagcttccatgcggccgacgcggctgccgtggcggccaagttcggcgtgagccacttcaacggcgccatctcgctggttatttggaccaccacgccgtggaccttgccggccaaccgtgcgatctcgctgcacccggatttcacctatcagctggtgcaggttgacggccagtgcctgatcctggcggccgaactggtggaaagcgtgatgaaacgcgccggcatcaccgagtggacggtgctgggcagctgcaaaggcgccgatctggagctgctgcgcttcaaacacccgtttatggacttcgacgtgccggcaatcctcggcgagcatgtgaccctggacgccggtaccggtgcggtgcataccgcgccgggccacggcccggacgacttcgtgatcggccagaaatacggcctggaagtggccaacccggtagggccgaacggctgctacctgaccggcacctacccgctgctggacggcaagttcgtcttcaaggccaacgatctgatcgtcgatctgctgcgtgacaaaggcgcgctgctgcacgtcgagaagttcctgcacagctatccgtgctgctggcgccacaagacgccgatcatcttccgcgccacgccgcaatggttcatcagcatggatcagaaaggcctgcgtcagcagtcgctggaagagatcaagggcgtgcagtggatcccggattggggccaggcgcgcatcgaaatgatggtcgccaaccgcccggactggtgcatctcgcgtcagcgcacctggggcgtgccgatgtcgctgttcgtgcataaagagaccgaacagctgcacccgcgcagcgttgagctgatggaagaagtggccaaacgcgtcgagcaagacggcattcaggcctggtgggatctggacgcggccgacatcctcggcgcggaagccgccgactacgtgaaagtgccggatacgctggacgtgtggttcgattccggttccacccacgcctcggttgtcgacgtgcgtcctgaattcaacggccacggcgccgacatgtatctggaaggctccgaccaacaccgcggctggttcatgtcatcgctgatgatctccaccgcgatgaagggcaaggcgccgtacaaggaagtgctgacccacggcttcaccgtcgacggccagggccgcaagatgtccaagtcgatcggcaacaccgtcagcccgcaggacgtgatgaacaagctgggcggcgacattctgcgtctgtgggtggcgtcgaccgactacaccggcgagatcgcggtgtccgacgagatcctcaagcgttctgccgactcttatcgccgcatccgcaacaccgcgcgcttcctgctggccaacctgaacgggttcgagccgagcaccgattgcgtggcgccggaagacatggtggtgctggatcgttgggcggtcggccgtgcgctggcggcgcagcaggatatcgagcaggcttatgccaactacgatttccacgaagtggtgcagcgtctgatgcagttctgttcggtcgagatgggctcgttctatctggatatcatcaaggatcgccagtacaccgccaagagcgacagcgtcgcccgccgcagctgccagaccgcgctgtatcatatcgtggaagcgctggtgcgctggatggcgccgatcatgtcgttcaccgcagacgagatctggggcttcatgccgggcaaacgcgcgcagtacgtgttcactgaagagtggtacgacggcctgttcgggctggcggaaggcgagccgatgaacgacgctttctgggctgagctgctgaaagtgcgcggtgaagtgaacaaggtgctggagcaggcgcgtgccgacaaacgcctcggcggttcgctggaagcggcggtgacgctgtatgccgacagcgagttggcggcgcgtctgaacagcctgcaggatgagctgcgctttgtgctgctgacctctgcggcaagcgttgcgccattggcggatgcgccggccgatgcgcaggcctccgagctgttgaaagggctgaagatcgccttcagcacagcgccaggtgagaagtgcccgcgctgctggcattacaccaccgatatcggcctggtggcggagcatgcagacatctgcggccgctgtgtgagcaacgtcgccggtgacggcgagaagcgtaactttgcctgagaacttgcgcctgatgagtaaaccaatttgttcgaccggcctgcgttggctgtgggttgtggtggcggtgctggcgctggatttcggcagcaaacagtggatcctcgctaactttacgctgggccagtcccagccgttgatcccgtcgttcaacctgttttacgcgcgcaactacggcgccgcgttcagcttcctggccgaccatggcggctggcagcgctggttctttgccggcatcgccatcgccatcgtcgcggtgctgctggtgatgatgtaccgcagcaccgcgcagcagaagctgaacaacatcgcctacgcctttattatcggcggggcgttgggcaacctgttcgatcgcctgtggcacggtttcgtggtcgacttcatcgacttctacgtcggtgattggcactacccgacctttaatctggcggacagctttatctgcgtgggtgcggcgatgatcgtgctggaaggtttcctgtcgccggcgagcaaaggcgcaaagagtaaaggtgagtaatatgacggctcaggttatcagtgacagcgcggtgctggttcacttcacgctgaaactggaagacggttcgaccgccgaatccacccgcagcagcggcaaaccggcgctgttccgcctgggtgacggcagcctgtcggcgccgctggaagagcaactgctcggcctgcgcgcgggcgacaagtgcgcctttaccctgcagccggaagcggcgttcggcgcggagaacccggatctggtccagttcttctcgcgccgcgacttcgcggaaaccggcgtgccggacgtgggcaccatcatgctgtttaccgccatcgacggcagtgaaatgccgggcgtggtgcgcgcagtggcggaagattcgatcaccgtcgatttcaaccatccgctggcgggtcatccggtgaccttcgacatcgaagtgctggagatcgatccgcagcaggaggagacgcatgcaaatattgctggctaacccgcgcggcttctgcgccggggttgatcgtgcgatcagcatcgtggaacgcgcgctggagctgtatggcgcgccgatctacgtgcgacatgaagtggtgcacaaccgctacgtggtcgacagcctgcgtgagcgcggcgcggtgtttatcgaagagatcgccgaagtgccggacggctctatcctgatcttttcggcgcacggcgtgtctcaagccgtgcgcgccgaagccaaggcgcgcgatctgaccatgctgttcgacgccacctgtccgctggtgaccaaggtgcatatggaagtggcgcgcgccagccgccgcggcaccgaagcgattctgatcggtcacgccgggcacccggaggtggaaggcaccatgggccagtacagcaatccgcagggcggcatgtacctggtcgagtcgccggatgacgtgtggaagctgcaggtgaaagacgaaaacaacctgtgcttcatgacgcagaccacgctgtcggtggatgatacctcggacgtaatagacgcgctgcgtcaacgcttcccgagcattatcggtccgcgcaaggatgacatttgctacgccaccaccaaccgtcaggaagcggtgcgcaacctggccggcgatgcggacgtggtgctggtggtggggtcgaagaactcctccaactctaaccgtctggcggaactggcgcagcgcgttggaaaaccggcttatctgatcgattcggcggcggatattcaggaaagctggctgagcgaagcgcgcaatatcggcgttaccgccggcgcctcggcaccggatgtactggtgcaggaggtgatctcccgcctgaaagcgctgggcggcctggacgtgcatgaaatcagcgggcgtgaagagaacatcgtgttcgaagtgccgaaagagctacgcgtggacgtccgtcagattgactgaggtgcgtgagtgaatgacaacggggagcttaggcttcccgttttttttggaatgccaacggcattaaaaataaaatgctgagtatattcaaattttctgctaactaaagtcaaatttattctgagtatttgaaatagcggtggcgtcattaattatatagactgaatgaagtcattaaatagaatatcattaggctgcaatctaaatagggcctggtgtcgtcaacgtgattacaataattacaatagtagtcttgcagatgtttcttattttattcttgtcgaatctgttctaggtcgtttaatcctttctcctttaaatagagcttcatatgctccagcaatcgccggacttttaatggctggatctcccgtctcggcataatggcatagcaattaatttccggtaatcgccagtcgggcaatatttcaatcagctcgccgctgcgcaactctcgctcgacgttggcgaagaaattgcgaatgatgcctttgccggtcagcgccagctccttcatcgccatgccgctgttggtgaacagtcgcccggtcatgcgcatgcggtgctcgccgccgtcgcgatggatcaggcgaacaaactgcggattgccgagcggcgtaaaggtgacccaatgatgatgggtcagcgcctgaggcgaatccggcaccccgtggtgtgccagataggctggggacgcgcacagcacttcgcggcagcgcgccagccgcgttgagacgtagctggagtcagccagcgcgccgccgcgtattgccagatcgatgcgttgcgcgatgaggtctattctctcatcgtggatttccaaccgcagcgtgatgcgcgggtgttcgtcgaggaagctctgcagcgccggcaccagataatgggtggcgaattcggtcgaggtggcgacgcgcagttcaccgaccagctcaccgcgcagcgcggcgatccgctgttgcccgcgctcggcggcgtggatcatcagcagacaatcttcataaaagcacaatccggcttcggtcaggctcaatgagcgcgtcgatcgcaacagtaattgaatgcccagatgttcctccagctggcgaatatgctggctgacggccgatgtcgtcatgcccaattcttttgccgccatgctgaatgcgccacaatcgaccacttttgagaaaatggccatgcgttttaaaatattgctcatagtttgttaagcacaacttaacctagattgtgatttatacgggctaataatatagcaccatctttcctatattgcctgaagcatataaacgacgggctgattattattttgcatgcgttttatctctttttgataaatcttattgcgcttgccaataatacacccgcgccacatcgcaacaggagctcattgtggatagcgcacagaaaaaagaagaaatagcattaaaaatcctacgtgaattattgcaatatcgacgtcgcctcatcgccgacgatgcttctctggctgaagaagagcggcaggtcactcaggtgcaattgccgcgcattcgggcattcattgaaaacgaccagcgcatcgaattcgtgctgccggcttttccgaccaagtcacccaacgccaataaggtgataggcgcggtgccggacatggcggagcggctgtcgctgatcttcctcaactcgctgtgccagcgtattcaactctattacccgccgggcgcgcatatcgttatctgttccgacggccacgtgttcggcgatctgatccgcgtcagcgacgaagcgatcaaccattatcaacgcgagattgaaagcctgctgcatgaagtgggcgcaacccacctgagcgtgttcaacctcggcgatgtcaaaggcctggcggagcataccgatgactacgatctgctgcgccggctgttggtggacggttatgccgaatcggaagaggcgatcaagcgccagctgatgcaggacgagcagggattaatgctgtatcgcgccatcacgcgcttcttgtatgaagacagcctcctgccgggctacagcggttccaacgccgcgctgcaaaaagacgccaaacggcgcgcctgcggcgttatccagcgcagctgggcctggggcaacctgctggcccagcatttcccggcggcgatccgcctgtcgattcacccgcagccggccgacagcctgaagataggcatccacatgatgccgaccaaagacgactggctgacgccgtggcatggcgtggcagccaacgtgaacggccagttcgtgctgatgaagcgtaaagatgcgcagagcctggacggcgaattggtggagatccgcggcacgccgagccattacctgatcgaacaaccgcagatggcctgaggccgctgcaggcttttgcgcccgaaatcctggcggacgcgtttttgacggcacgttgccgtgtgagcagcacattcgatgcaaggagaatcaccgatgaataaccaaccgcttaattgccatattcaaccgaataccccgttcggcgcgatcctgacgccgcagcatccggggcaaaagatcggcgaactgccggtggcagcgctgcgggcgctggcgcaggagcatcacttgctggtgctgcgcggattcgactccggttttagcgatggggaggttttgacgcgctacgccgagcagtggggcgagatcatgatgtggccgtttggcgcggtgctggacgtgaaggaacatccggacgccaaggatcatattttcgacagcagctacgtcccgctgcattgggatggcatgtataagccgactattcccgagttccagctgttccactgcgtggcggcgccgtcgccggacgaaggcgggtgcactaccttcgtcgacaccacgcgcttgctggccaatgcggacgaagcgttgctggatcagtggctgtcggtctcgatcacctaccgcatcaagcaggtggtgcactacggcggtgaagtctgttcgccgctggtggtgcagcacccgaacggcaggggcttgatcatgcgctacaatgaaccgccgacggaggggaaaaaattcctcaatcaacatgcgctggaatatcacggcgtgccggaacaacagcaggaacagttccaccacactctgcagcagcatctgtacgatccgcgtcactattatgcccaccaatggcaacagggtgacgtggtggtggcggacaacttctcgctgttgcacggccgcgagggctttaccgcccgttccgcgcgtcatttgcagcgcgtgcatattcaaagcaatccggtgtgcgccaatctggcgctgaagccggctaacacagaagcgtaaaggagcattatggcaaggatattgatggcggcagtcgccactccggggcacgtttacccgatgttggccatcgctcgacacctgattgcccaagggcatcaggtgcggatgatgaccggcgcgctgtttcgcgaacgcgccgaggcggcgggcgcgagcttcgtgccgttcgacgcgcaggtggatttcgattaccgccacctggagcagcacttccccgagcgcgccgccctgccgccgggcaatgcacagatggcgctggcgctgaaagatttcttcgccgcgccgatcccgctgctggatcggcaactgcgtgcgactatcgctgccgaagacaccgatctgctgatggtggagaactgcttctacggcgtgctgccgctgctgcagtctgccgaacggccgccggtcttcggtatcggcgttacgccgctgtcgtattcttcgcgcgatgctattttttatggcccgcgcatcccgccggcgctgctgccgcaggcgttgacccgtgagcagctggtggatgaagaaacgcgcgtgctgctcgatgaagtacagcagagcttcgatgcggcgctggtgcaggcgggcgggcgggcgctggatcgcccgttcaccgacgcgctgatcggcggctgcgagcgtttcctgcagctggctaccacggcgctggaatatgagcgcgacgatctgccgagcggcgtgcgcttcgtcgggccgctgcgcagcggtggtcaaccggccgcggaagaggcgctgtgggaggaggacgatcgtcggccgctggtgatcgtgtctcagggcacgctggccaatgtcgatctgcatcagctgatcgtgccgacgctgcaggcgctggcgcatctgccggtgcgggtgttggccaccaccggcgggcgggcgacggaaggactgatggacgcgctgccggccaatgccagagtgcgggagtttatctccttcgaacgctggttgccggagacggcgctgctgatcaccaacggcggttacggctcgatcaactatgcgctgaacagcggcgtgccgctgatcgtcgccggcaccggcgaggacaagctggaggcggccgcgcgcgtggtggccgccggctgcggcatcagcctgcataccagcacgccaagctccgaacaaatactggcggcagcgacgcgcattctgcaacagccgatctatcgccggcgcgcggcgctggtgcgtgaggactatgcccgccacgatgcgctgacggcgatcgccaacgaagtggccgccattaccgcctgacatcgccgcactccgttcctcaggcgccgttttcggcgccttttttctgcatttttttgccatggaaactgcatgattatgtacaatcgtcgcaggccgccaaatcggttgaatgttaatctcacgacagcgccgctgatgaaagcgggggaatatcataattttctaattatgaaatgaatcctctggcggcgctgcagcggggcagttaccctgaatcgatagcctaatgggataggcgtcaaatcaagaagagagcgagcatgagtgattcacaaatccgcattgcgattgcgggcgccggcggccggatgggccgtcagttgatccaggcggtgcagcaggcggaaggcgtggtgttgggcgcggcgctgtcgcgcccgggttcaagcctgatcggcgtcgatgccggcgagttggcgggcattggcgcgctgggcgtcaaggtaagcgacagcctggataaagtggcgagcgagttcgacattttgatcgacttcacccgcccggaaagcacgcggaactacctggatttttgcgtggcgcaccacaaggcgatggtgattggcaccaccggcttcgatgacgcgggcaagcaggcgatccgcgctgcggcgcagcatatcggcatcgtgttcgccgccaacttcagcgtcggcgtcaacctggtgctgaaactgctggagaaggccgcgcaggtgatgggcgactataccgatatcgaaatcgtcgaggcgcaccaccgccacaaagtggatgcgccgtcgggcacggcgttggcgatgggcgaagcgatcgccggcgcgctggggcgcgatctgaaaagctgtgcggtctatgcgcgcgaaggccataccggcgagcgcgatccgaagagcatcggctttgccaccattcgcgccggcgacatcgtcggcgagcacaccgcgatgttcgccgacatcggtgaacgggtggaaattacccataaggcttccagccgcatgacttttgccagcggtgcggtgcgcgcggctgcctggctgcataaccgggataaaggtttatctgatatgcgagacgtgttgaatttggaccagttataattgatttgcataccatcgtgatgtggttgtattgatcataatgctatgataatcgggcaataattttattgtccttttttttaacatgataaatatcatgttgattttatttcattgccaaagctgttatttgtctgtgtttactttgctaatcatctcctttttttccaccctcggcttttttagcgtcttttttgtcccattccggcgctattttccgtcattcttccccgcaaccgttttccagccccggttttctgtgtttttatcgccgctcaagccgcatgagcgccgagaactgcaaaaataaaacaaaaaacggcagtttgggtagacaagccaggcactcatcattaaaatgcgcccaatttgccaaaaattggcctcgcggacggtttttgcattgatttagatcgcgatatctgaattaatatgcaaatattgtgattgattattccttggagggtgttttgataaagtcagcgctattggttctggaagacggaacccaattccacggtcgggccatcggggcagagggaacggcagtgggggaagtggtcttcaatacgtcgatgaccggttatcaagaaatcctcactgatccttcctattcccgccagatcgttactcttacttatcctcatatcggcaatgtcggcaccaatgcttccgacgaagaatcctccgcagtacacgcccaaggcctcgtcattcgtgacctcccgctgatcgccagcaactaccgcaatgaagaaagcctgtccgactacctcaagcgtcacaacatcgtggcgatcgccgatattgatacccgtaaattgactcgcctgctgcgcgaaaaaggcgcccagaacggctgcatcatcgccgccgattcgccggacgccgcgctggccctggccaaggcgcaaggtttcccggggttgaagggcatggatctggcgaaagaggtcaccacccaagaggcctacagctggcagcaaggcagctggacgcttgaaggcgacctgcccgaagccaaaaccgccgcggaactgccgttccacgtggtggcttacgactacggcgccaagcgcaacatcctgcgcatgctggtggatcgcggctgccgcctgaccgtggtgccggcgcagaccccggccgacgaggtgctgaaaatgaatccggacggcatcttcctgtccaacggcccgggcgatccggagccgtgcgactacgccatcaccgccatcaaacagttcctggaaaccgacattccggtgtttggcatctgcctgggccaccagctgctggcgctggccagcggggcgaaaaccatgaagatgaagctcggccaccacggcggcaaccacccggtgaaggatctggacaacaacaccgtgatgatcaccgcgcagaaccacggctttgcggtcgatgagaacaatctgccggcgaacctgcgtgtgacgcacaaatcgctgttcgaccacacggtgcagggcattcaccgcaccgacaaagcggcgttcagcttccagggccacccggaagccagcccaggcccgcacgacgccgcgccgctgttcgatcactttatcgaactgattgagacttaccgttctaacgccaaataatcaggagcagtaaaaaatgccaaaacgtacagacataaaaagcatcctgatcctcggcgctggcccgatcgttatcggccaggcgtgtgagttcgactactcgggtgcccaggcgtgtaaagcgctgcgcgaggagggttaccgcgtcattctggtcaactccaacccggcgaccatcatgaccgacccggaaatggccgatgcgacctacattgagccgatccactgggaagtggtgcgcaagatcatcgaaaaagagcgcccggatgcggtgctgccgaccatgggcggccagacggcgctgaactgcgcgctggaactggagcgtcagggcgtgctggccgagttcggcgttaccatgatcggcgccaccgccgatgcgattgacaaggccgaagaccgtcgccgtttcgacgtggcgatgaagaaaatcggtctggataccgcgcgttccggcatcgcgcacaccatggaagaagcgctggcggtggccgctgacgtcggcttcccgtgcatcatccgtccttcctttaccatgggcggcaccggcggcggcatcgcctacaaccgcgaagagttcgaagagatctgcgaacgcggtctggatctgtcgccgaccaacgagctgctgatcgacgaatcgctgatcggttggaaagagtacgagatggaagtggtgcgtgataagaacgacaactgcatcatcgtctgctccatcgaaaacttcgacgccatgggcatccacaccggcgactcgatcaccgtcgcgccggcccagaccctgaccgacaaggaataccaaatcatgcgcaacgcctcgatggcggtgctgcgtgagatcggcgtcgaaaccggcggctccaacgtgcagttctcggtcaacccgaaaaccggccgcctgatcgttatcgaaatgaatccgcgcgtgtcgcgctcttcggcgctggcgtcgaaagccaccggcttcccgatcgccaagattgccgccaagctggcggtgggctacaccctcgatgagctgatgaacgacatcaccggcggccgcaccccggcgtcgttcgagccgtccatcgactacgtcgtgaccaagatcccgcgcttcaacttcgagaagttcgccggcgccaacgatcgcctgactacccagatgaagtcggtcggtgaagtgatggccatcggccgcacccagcaggagtcgctgcagaaagcgctgcgcggcctggaagtgggcgccaccggtttcgacccgaaagtgagcctggacgatccggaagcgctgaccaaaatccgccgcgagctgaaagacgccggttccgaccgcatctggtacatcgccgacgccttccgcgccggtttgtcggtagacggcgtgttcaacctgaccaacgtcgaccgctggttcctggtgcagattgaagagctggtgcgcctggaagagcaggtggccgacgcgggcatcaacggcctgaaccaagagttcctgcgcaccctgaagcgcaaaggcttcgccgatgcgcgtctggccaagctggccggcgtcgccgagagcgaaattcgcaagctgcgccacagctacggcctgcatccggtctacaagcgcgtggatacctgcgcggcggaattcgccaccgacaccgcctacatgtactccacctatgaagaagagtgcgaatccaacccgaccaacgaccggccgaaagtgatggtgctgggcggcgggccgaaccgtatcggccagggcatcgagttcgactactgctgcgtgcacgcctcgctggcgctgcgcgaagacggctacgagaccatcatggtcaactgtaacccggaaaccgtctccaccgactacgacacctcagaccgcctgtactttgagccggtgaccctggaagacgtgctggaaatcgtgcgcatcgagaaaccgaagggcgttatcgtgcagtacggcggccagaccccgctgaagctggcgcgcgagctggaagccgcaggcgtgccgatcatcggcaccagcccggacgccatcgaccgcgccgaagaccgcgaacgcttccagcaggcggtcaaccgcctgggcctgaagcagccggccaacgccaccgtcaccgccatcgaacaggcggtggagaaggcggcgggcatcggttatccgctggtggtgcgtccttcctacgtgctgggtggccgggcgatggaaatcgtctatgacgaaaccgacctgcgccgctacttccagaccgcggtcagcgtgtccaacgatgcgccggtgttgctggaccgcttcctggacgatgcggtggaagtggacgtcgatgctatctgcgacggcgagcgcgtgctgattggcggcatcatggagcacatcgagcaggcgggcgtgcactccggcgactccgcgtgttcgctgccggcgtacaccctgagccaggaaattcaggacgtgatgcgtcgtcaggtggaaaaactggcgttcgagctgcaggtgcgcggcctgatgaacgtgcagttcgcggtgaaagacaacgaagtctacctgattgaagtcaacccgcgcgccgcgcgcaccgtgccgttcgtctccaaagcgaccggcgtgccgctggccaaagtggccgcgcgcgtgatggcgggcaaaacgctggccgagcagggcgtgaccgaagagatcatcccgccgtactattcggtgaaagaagtggtgctgccgttcaacaaattcccgggcgtcgacccgattctggggccggaaatgcgctctaccggggaagtgatgggcgtgggccgcaccttcgcagaagccttctccaaagcgatgctgggcagcaactcgggcatgaagaagcagggccgcgcgctgctgtcggtgcgtgaaggcgataaagcccgcgtggtcgatttggccgccagcctgctgaagcagggcttcgagctggacgccacccacggcaccgcagtggtactgggcgaagcgggcatcaacccacgcctggtcaacaaggtgcacgaagggcgtccgcacattcaggaccgtatcaagaacggcgagtacacctacatcgtcaacaccacggcaggccgtcaggcgattgaggactccaagctgattcgccgcagcgccctgcagtacaaggtgcactacgacaccacgctgaacggcggcttcgccaccgcgatggcgctgaaagcggatccgaccgagcaggtgacgtcggtgcaggaaatgcacgcgcgcatcggcaagtaaccgcgcgataacgcaacgtaaggggcgctgcagatgcagcgcccttttttattcagtgaatttgtaggctggcgttaaaaatttccgctatcaatcagtgggcaaactgtcactctgtgtgattggtatatgcttggtgtattggcaaggaacgaaggaacgacgataacaatgattctgataatttatgctcacccgtatccccggcattcgcatgccaatcaccgcctgctgcaggcggtgaaggatctccccgaggtggaggtgcgctcgctgtatgagctgtaccccgatttcaatatcgacatcaacgccgagcagcgggcggtggagcgcgccgacctggtggtgctgcaacatccgatgcagtggtacagcttcccgccgttgttgaagctgtggatcgacaaagtgctggagcacggctgggcctacggccacgacggcaatgcgctggtgggcaaagactgcctgtgggcggtgaccagcggcggcgacgagcaccacttcgagctgggcgacttccccaacttcgccgcgctggcgcagccgctgcaggccacggcgatctattgcggcatgacctggctgccttatttcgccgtgcacaatacctttacctgcaacgagccagcgctgcttgccgccggcgaagcctaccgccagcggctggtcgactacctgatggaacatgccgaagcggaaacccgggaggccagccatggataatcaccacgtgatgatcgaagggctgatctacctcggctccgcggcgctgtttgtgccgatcgcggtgcgcctgggactgggttcggtgctcggctacctgatcgccggctgcatcattggcccctgggggctgaagctggtgtcggacgccgaatcgatcctgacctttgccgagatcggcgtggtgctgatgctgtttatcatcggcctggagctggatcctaaacggctgtggacgctgcgtgcctcggtgttcggcggcggcagcattcagatggtgggctgcggcctggcgctgagcgccttctgttacttccttggccttaactggaaggtggcgctgctgatcggtttgacgctggcgctctcatccaccgccattgccatgcaggcgatgagcgaacgcaatctgacgccgtcgccgatcggccgcagcgcgtttgcggtgctgctgttccaggatatcgcggcgatcccgctggtggcgatgatcccgctgctggccagcagcggcgccaccaccacgctgggcgctttcatgctgtcggcggccaaggtggtgggcgcgttgacgatggtggtgttgcttggccgctacgtcacccgcccgctgctgcacttcgtcgcccgttcgggcatgcgcgaagtgttcagcgccgtggcgttgttcctggtgttcggcttcggcatcctgctggagatggccggactgtcgatggcgatgggggcgttcctcgccggggtgctgttggcgagctcggaataccgccacgcgctggagagcgatattcagccgttcaagggattgctgctggggctgttcttcatcggcgtcggcatgtcgatcgacttcggcacgctgttccatcatccgttgctgatcgcctcgctgctgctgggctttatgctgatcaaggcggcgttgctgtggctgattgggccgctgctcggcgtgccgaagcgccagcgcggcctgttcgccattctgctggggcagggcagtgagttcgccttcgtgattttcagcgccgcacagctggccggcgtcttgccggttgaatgggccaagtcgctgacgctggcggtggcgctgtcgatggcggccaccccgctgctgttggtgatcgccgcgcagctggagaaaaatgcgccgaaagaggatcgcccggctgacgtcattgatgacgagaatgccagcgtgatcatcgccggcttcggccgtttcggccagatcgccggtcgtttgttattggccaacggcgtgcacaccgtggtactggatcacgatccggaccatatcgaaacgctgcgtaaattcgacaccaaggtgttctacggcgacgccacgcgcgccgatctgctggaggccgccggcgtcgctcacgccaaggtgctgatcaacgccatcgacgacgtggaagacagcctggcgttaaccgagctggccaggcagcacttcccgcatcttaaggtggtggcgcgggcgcgcgacgtcgatcactggtatcagctgcggcagttgggggtggaaaaaccggagcgcgaaaccttcgaaagctcgctgcgcgtcggccgtgaaacgctggagttgctggggctggacgcctatgaggcgcgcgagaaagcggacacgttccgtcgctataacctgaagatgctggaagatacgctggataattaccaggatactgaattccgtatcgccagcctgcagcgggccaaggagatgctcagcgcggccatcgagcaggatcagaatcggctggcgcgggtgcagcagaccggctggcgcggcagtatcgacggcaaggcgccggaggatgaagtggtggaagccaaaggataaggggaggggcgccgtgatggcgcccctttttttgcttagctcagcgcgaccttgatgcctaaggcgatcaacatgccgcccagcaatttgtcgacgatcttctgcgtcttttccagcccgcggcgcaccggcccgctctggatcaaaaataccagcagcggccaccagatgaccgacaggccgagaataatccccgcgtaccacagcttgtcacccagaccggaatcgatctgcagcacctgggtgaagaccgccaggaagaacagggtggctttcggattcagcaggttgcacaggtagccttgcgcaaaggcgctcttcaggctgacctgctgctgcggcagattgctgacgttcattttgccgccgccgcgcgacagcagcgcctggatgccgatccacaccagatagaccgccccggcgtatttcagcaggttgaacagccacggcgtggtggtgatcaccaccgccagcccggcgacgcagtaggacatgtgggtggcgacgccgcagatcacgccgaaggcggtcatcatggcggccagccgcgggtagcgggcggcgtttttgatcaccaggaaaaaatccgggccgggggagagcatgccgagggcggcaatgccggcgacgaacaacgaagtttcaagcatgggagacgtctcgcgcaaaaggcagcaatctggcgataataacgccgcttcctctgatgcgcatcaatccaatgaggtattgttaggctctatgataatacttcatctaccgcccgcgacggagcaccatgcagcagactaccgccacagacaggccggaaccgcaccggcaacagcgtgaaatcacccgactgtgcattcaatgcgcgttgctgctgttgcagcacggcgccgagagcacggtggtggaacagttatcaactcgcctgggactggcgctgggcatggacagcgtggaaagctcgatctccgccaatgcggtggtattgaccactcttagccatggtgcctgtctgaccaccacccgtaagaacgtcgatcgcggcatcaatatgcaggtggtgaccgaagtgcagcatatcgtgatcctcgccgagcatcgcctggcggatgcgcacgacgtggcgcgccgctttgaaaggatccggccgctgcgctacccgcgctggctggtggtattgatggtggggctgtcctgcgggtgcttcagcatgctcaacggcggtggcggcgacgccttcctggtgacctttatcgccagcggcacggcgatgttggtgcgccaaatcctcaccgcccgccagatgaatccgctgatcaatttctgcctgacggcatttgtcgcgacgtcgatctccggactgctgctgcgcctgccggcgtttaaagacacctcgagcgtggcgatggccgccagcgtgctgctgctggtgccgggcttcccgctgatcaacgcggtggccgacatgttcaaggggcatgtgaataccgggctggcgcgctgggcgatggccagcctgctgacgctggcgacctgtatcggggtagtgatggcgatgtcgctgtgggatctgcgggggtggtcatgaatctgttgtgggccttgttgcaggagatgctattggcggcggtgccggcgctgggcttcgccatggtgtttaacgtgccgctgcgtgcgctgcgctattgcgcattgctcggggctatcgggcgcggttcgcgcatgctgatgatgcatgccggcatgaacatcgagtgggcctcgctgctggcggcgatcctgattggcatcatcggcatctactggtcgcgctggctgttggcgcacccgaaggtgttcaccgtggcggcggtgatcccgatgttccccggcatttccgcctataccgcgatgataactgtggtggagatctcgcatctgggctacagcgaggccttgatggagaccatgatcactaacttcctcaaggccagtttcatcgtcggtgccttgtcgatcggcctgtcgttaccgggcctgtggctgtaccgcaaacgccccggcgtgtgaaatttcccggcggaagaacgttggttattagatatgctgataagagctatcttatatattcatcttgcttgattagcctatcgacggcactcaggcctttacgtatagtgtcaccaattttgctgcctacacagggttaaacaatgattatcagcctgatcgctgccttggcggcggatcgcgttattggcatggaaaacgccatgccgtggcacctgccggcggaccttgcgtggtttaaacgcaacacgttgaataagccggttattatgggccgcaagaccttcgagtccatcggccgcccgctgccgggccgccacaatatcgttttgagcagccgcccgggcagcgaagccggggtgacctgggtaacctcgctggatgaggcgctggccgccgcgggcgaggtggaagaagtgatggtgatcggcggtgggcgcatctatacccagttgctgccgcgcgccgaccgtctgtacctgacgcacatcgacgccgaagtcggcggcgatacccacttcccggattacgagccggacgagtgggaaaccacgttcagcgagttccacgacgccgacaatctgaactcgcacagctactgtttcgaaatcctgcagcgccgctgatctcagcgcgttagccagttatccccgggggcgcaagcaattgcgcccccggtctttttacgccggtcattcgtaacctttccgtcacattacctgattagtatgaagcccaactccgagcgccacggcaactctggtgaatcttgaccgcggcgccataactaaaaaggtaaccacgttatgaccaagcaaattgagcaattagacgccgaccgcctgatcgatcccactcgccgcaagctgttgctcggcagcgccggcgccgtcggcctggccggctttctcggcggtggcatctggtcggtctccgccgaggcgttggccgaggatctgccaccgaacaggctgctgggctttcagggcatcgccgcatctatcgccgacgaggtgaccatcgcgccgggctaccgcgcggaggtgctgatctcctggggcgagccgctggtggacggcgcgccggccttcgatccgcagggcaacaacagcgccgccgatcaggaaaaacagtttggcgacaacaatgacggcatgagcttcttccctattgatgacaatcacggcgtgatggccatcaataacgaatacgtcaacgaacagtatctgttcgcccacggcggcgccaaagccaccagcctggaagaggtgcgcaaatcgcaggcggcgcacggcgtctccattgtggcggtcaagcgggttggcgacggccagcgctgggaggtggagcgcccgtcgcgctataaccgccgcatcaccgccaacagcgaaatgcagttcagcggcccggccgccgggcactcgctgctgcagaccgccgccgatccgagtggccgcaaggtgttgggcaccttcggcaactgcgccaacggcaagacgccgtggggcacctatctgacctgcgaggaaaacttcgatacctatttcggcacccgtcaggccgattatcgcaccacgccggaacagaagcgctacacgctgaaggccagcgaaccggagcgcaactggccggactatgatgagcgcttcgatgtggcgaagaaccctaacgaattcaaccgccacggctggattgtcgagatcgatccgttgaatccgacctcgacgcccatcaagcacactgcgctcggccgtttcaaacatgaaaacgcggcggtgaccgtggccaaagacggccgtctggtggtgtatatgggcgacgacgagcgcggcgaacatatctataagtacgtctccaaaggcgtggtcgacgccgccaatccggccaacaatcgcacgctgttggacgaggggacgctatacgtggcgcagttcgacggcgatgaagccggcacaccgctgaagggcaaagggcgctggattgcgcttgagttcggcaagaacggcctgacgccggagaacggtttccgcgatgaggccgaagtgctgatcttcgcccgcaaggcggcgcagcaggtcggcgccaccaaaatggatcgcccggagtggatcgcggtgaacccgcatgacggccgcgcgtactgcacgctgaccaacaacagcaagcgcggcgaggaagggatgccgctgaacgccgccaacccgcggcctaacaatatctatggccaaatcattcgctgggacgagggcggcgacgctaccgccgacgtcttcgcctgggacatctatgcgctgtgcggcaacccgatcgcccaccccgaaggcgtcaaccgcggcacgccgaacatcacggcggaaaataccttcaacagcccggacgggctgggcttcgatcgcgccggccgcctgtggatcctcaccgacggcaagtacagcaacaagggcgattatgtcgggcagggcaacaaccagatgctggtgggcgatccggtcagcggtgagatccgccgtttcatggtggggccgaagtcctgcgaactgaccggcatcactttcaccccggactacaagacgatgttcgtcaacgtgcagcatccgggagaagagggcgattcgcacttcccgaacaacagcccgcgcccgcgctcatcggtattgatgatcacgcgtgaaaatggcggggtgattggggcgtaaggcgataatatagaaaacaaaggcggccacggggccgcctttgtattttcaggatgcggctaatctgccggcgtggtcagacgcctcgccgcgattggcgggctgcgtgaagtaacggcggtcttcccagcgcagcatcgtcaagtcgccgccccagcaacagccggtatccagcccgatcacgccttccggcgtgcccttgccttcgagcgaggcccagtggccgaagatgatggtgtattccgggtccaccaggcgcggcagttcgaaccacggcttcagcggcgccggcgcgctgcccggcgcatctttgcagatcatgtcgagctggccgttggggaagcagtagcgcatgcgcgtgaacgcattggtgctgaaacgcaggcgcgccaggccgctcagctccggcgcccagttgttcggcatgtcaccgtacatggcgtcgaggaacagcggatagctgtcgctgctcaataccgcttccacttcgcgcgcgcacattttcgcggtgtcgatatcccactgcggggtgatgccagcgtgcgccatcaccagcttttgctcatcatccacctgcagcaccggttggcggcgcagccagttgatcaactcgtcggcgtcaggcgcctccagcagcggggtgatgcgatctttgggtttgttgcggctaatgccggcgtaaaccgccagcaggtgcagatcgtggttgcccagcaccatgcgcaccgccggaccgagcgaacgcacgtagcgcagcacgtccagcgaggcggggccgcgcgccaccagatcgccggtcagccacagttgatcgcgctcgggatcgaacgcaacctgagccagcagcgacttcagttcatcaaaacagccgtgaacgtcgccgataaggtatgtcgacataattaatggatcagcgttggaatggctaagcgaaacacgggaatagcggtgcggaacggctgaccctgatggtcaaccatttcgtaatggccttccatggtgcccagcggcgtttccagaatggcgccgctggtgtactgaaactctccgccgggcggaatgacgggctgttcgccgatcacgccttcgccctggacttcggtttggcggccgttgctgttggtgatcagccagtaacggcccagcagttgcacgttggtccgccccagattgcggatggtgatggtataggcgaagacgtaacgctcttcttcagggatcgactgtgattccacatagatgctctgaacctgaatacacacgcggggcgaatcaatcatgacaacaactccttattgctgcggcgccggattggctgacagccagttcgccagcttgcagtactgcgccacagaaatattttctgctctgagcgaaggatcgacgcccagctccgtcagctgctccggcgtgaacaggtcgcccaggctgttgcggatggttttccgccgctggttgaacgcctgcgtggtgatgcggctcagcatgcgcacgtcgcccaccgggttcggcagctcggtgtgcgggaccaggcgcaccacggcggaatcgactttcggcggcggcgcgaacgcggtcggcggcacttccagcaccggaatgacgttgcagtagtactgcgccatcacggtcaaacgcccgtaggccttgctgttcgggccggccaccagacggttgaccacctctttttgcaacataaagtgcatgtcgcggattgcctgagtatagctgaaaaggtggaacatcagcggcgtcgaaatattgtacggcaggttaccaaatacgcgcagcggttggccagcttcctcggccagttcggcgaaattcaccgtcatggcatcctgctggcggatggtcagcttgtctttcagccgcggatggttctccaaccgggtggccagatcgcggtccagttcgatcaccgtcatgcggtccatgcgcgcgccaaccggctcggtcaaggcgccgaggccggggccgatctcgaccaccgcttcgcccggctgcgggtgaatggcggagacaatgctatcgatgacaaactgatcggttaaaaagttttgtccaaagcgtttgcgggcaaagtgcccttggtggactctgttattcattacaattaattatcattttaatggcgagattcagggccgtttggaaactgccgacatcggcggtgccggtgccggccagttccagagcggtaccgtggtcgaccgaggtgcgtatgaaaggcaaaccgagggtgatattcaccgcgcggccgaacccttggtattttagcaccggcagcccctgatcgtgatacatcgccagcaccgcatcggcatcttgcagatatttgggctggaacagggtgtccgccggcagcgggccgatcagatggataccgtcagcgcgcagcgcgtcgagcgccgggatgatggtgtctatctcttcgcgccccatatggccgccttccccggcgtggggattcagaccgcagacgtaaatgtgcggctgagcgatgccaaatttggttttcagatcgtggtcgagaatgcgaatgacttcgaacaggctctgctgcgtgatggcgcccggcaccgccagcagcggcaggtgggtggtcgccagcgccacgcgcagctcttcggtcgcgagcatcatcaccacgcgatcgcagcggctgcgatcggcaaagaattcggtatggccgataaacggcacgccggcgtcgttgatcacgcctttgttcaccggaccggtgatcagagcggcaaattcgccgttcaggcagccgtcgcaggcgcgcgccagggtttccaccacgtaggcgctgttgccgacgttcagttcaccggcggtgaccggctgagcgagcgacaccggcagcacggtcagcgtgccggcgcgttgcgcctcggccggttgctgcggttggtagtcgcgcagcgtcagcggcaggcccaaacgcttggcgcgttcaagcaacagggccggatcggcgcacaccaccagctcaacaggccaatcctgttgcgccagggcggctaccaaatccggccccaccccggcgggttcgccgggggtaatgacgacgcgtttattgctgcgcatcgctgccatcgaggatcttcacgtaagcctgggcgcgctgttcctgcatccaggtctgcgcctcttcggcgaacttacggttgaacagcatgcggtaagcgcgatctttctgcgcggcgtcggttttatccacctgacgggtatccagcagctgaatcaggtgccaaccgaaggaagagtgcaccggtgcgctgatttcacctttgctcagcttcagcaacgcatcgcggaaggccggatcgtagatgtccggggaggcccagcccagatcgccgccctgcatggcggaacccggatcctgcgacagctgtttggcttcgtcggcgaatttggcgcggccgctcttgatggcttccgcaacggattgcagcttggcgcgcgcctgatcgtcagtcagcaccaccgaaggcttcagcaggatgtgacgggcgtgcacttcggtgaccgacaccgactggctggcgccgcggatatcgttcactttcaggatgtggaagccgacgccggaacggattgggccgacgacgtcgcctttcttggcgctcaccagacgttcagcgaacagggtcgggatctcttgcagcttgccccagcccatgttgccgcctttcagcgcctgagagtcggcggagtaagtgatcgccagcttgccgaagtcggcgccgctgttgatctcacccaccaggcgtttggccagctcttcggctttgtcgacctgctgctgcgacgggttttccggcagcgggatcaggatgtggctgatgttcatttcggtgtcgctgccgttctgcgcgcccacctgtttggccagcgcgtccacttcctgcggcaggatggtgacgcggcggcgcacttcgttgttacgcacttcggaaatcagcatctctttacggatctgcgaacggtaggtgttgtagttcaacccttcgtacgacaggcggctgcgcagctgatcgacgttcatgcggttctgcgcggcgatgttggcgatcgctttgtccagctcggcgtcggagacggtgatgcccattttcttggccatctgtagctggatgttatccatgatcagacgttcgatgatctgatggcgcagcgtcttgtcgtccggcagttgctgaccggcctgctgggcgttgagcttcaccgactgcaacagtccgttgacgtcgctttcgagtaccacgccgttatccacgacggcggcgactttatccacttcttggggtgctgcgaacgcggcattggcgcaaaccaccaatccgagaataagcgttctccagttcttcatacatttcccattatgtaatccgcaaatgcgggtgaaagttctcgttttcaaagtgttgcaaagcgtcagaatgcgcgctgatacggcaggatgccggagcgcagcatttctgcggagccgagactatgatcgctgctcaggccgcgcagttcgacgttgaacgaaactctgttgtcgtaaacgctggtattgttgctgttgttccagtcggtgatcttgcgctcatagcccagcgtcaccgcccagcagcaggtgttgtacttcagccccaccagctgatcggcggattgtttggcacgggtgtcgtagtagtacgccccgaccactgcccaacgatcggcgatcggccagctgccggtgatgcccacctgcgagatgccgtcctggaaggccggaaccgttttggtgttcaacgccgtctggatatattccggcgtggcgtaacggtagttcagctgcactacgcgctcggcatcctggcggtattccaccacgccgttgcccagcgagacgctgttcaggcgggtgtcgtactgcaggccgccgcgcaggccccaacgatcgtcgattttccaataggtatcgccggcccaggccacgctaccggtatcgtcgttgttgtcgtacccggttacccgatcgccggtgcgcgaacggctgaagtagtagatttgacccacggaagcgttaaaacgttcaaccagcgcgtcatcataaatgcgggtggtcaaaccggtagacacgcggttctgcgaagcgatgcgatccaggccgctgtaggtgcgatcgcggaacaggccggagtagtcggtctgcagcagcgtggtgtcgtaggtgtagatgttgctctggtcacggtacggcacgtacaggtactgcacgcgcggctccagcgtctgggtggcgccttcggcccagatcatcggccgctcgaacaccagcttgccgtcgaccttgaactgcggcagtacgcggttgaccgaatcatcgagctccggcgcggcagcgtttttgcggctctggtagttggcggcgaaaccgtcaggaatatcctgctggtaatgggtcgccatcaccttggcttcggtgttcaggctggcccagccgttggtgagcggcaggctcagcgtcggctccatatgcagacgggtggcgtccgggctgtatgggttgacgctggtgaacttggccgcctggccgtagatatggaaatcgaacggaccgaggtcgttcttgtagtagttcagatccaactgcggctggactttatacgagtctgattgtgagcgatcggtatcgtcgtaaatctggaactgcttggagctcagcgtggcgttccagttctcgttggcgtagccgaggctgaatttctgcgtggcgtagccgtcggtggtggagccgtatttggagtccagatcggtgaagtacttggaatcgctgaccttggtgtaatcgacgttgaagcgccacacctgatccataacgccgttgtggttccagtagaacagccagcgtttgttgtcgtcatgatctttgccgtattccttgtcgtccggcaaccagtcgaactccatcaggccgaggcccggctgcaccagataacggaactcggtctgccactgcaggccgcgcttggacatatagtgtggcgtgatggtggcgtcgtagttcggcgcgatgttccagtagtacggcaacatgaactcgaagccgttgttgctgccgtacttggcgttcgggatcaggaagccggaacggcgcttgtcgccgaccggcagctgcaggtacgggctgtagaacaccggcacgccgccgatgcggaagcgggcgttccatatttccgccacctgctcttcgcgatcgtggatcacttcggaaccgaccacgctccagctgtcgtcgcccggcagacaggaggtaaaggtgccgttttccaggatggtgtaacggttggcgccgcgcattttcatcttgtcggcgtcgccgcgcccctgacggccgaccatctggtagtcgccttcatagacgtcggtatctttggtattcaggttagaccaggccttcgggcctttcagtttgatctgattgtcgctgtagtgcacgtcgccggtggcggtgacggtacgcaccggttccgtctggccggggttttgcgtctgattcagctcaacttctttggcggtcagggtgctgttgccctgctcgatatgcacgttgccgctgaacagggcgcttttcgggtagtcggcgcgcgagtcatcggcattgatggtcaccggctggctgttcggatcgccgctgaccaaaggcttgtcgtaaacaggaacgccaagcatgcattgctcggccagatcagccagcgcatgctgactgtagagtgccgtccaaatcatcgtggccagcagtgttgggaaactttttttcatacgcggttttggtgttccgtcatcagaggcgtcgtgtccggcaaacggtcagagactatattactcatctgcgttgcgctagtgctaaatccagccgtttacttgcgtcgtcgttaggcgcaaagataaatgacaggtatgataatccaaattctaggaaaaatcgcctgcgccctttcctgaagcgaaggagagcgggcggctttcggcatgataattgaggagtatatgcagtattggggaaaactgctcggcgtcatcgtcgccatctggtctggcgcgggattctggggtgtagttctggggctgattatcggtcatatgatcgatacggcgcgcagcaacaagcgcagccgggggtttttcaccgaccagcaaacgcggcaaacgctgtttttccgcaccacttttcaggtgatgggccacctgaccaaatccaaagggcgcgtcaccgaggcggatatccagatcgccagcctgtttatggatcgcctgcagctgcacggcgaagcgcgcaccgcggcgcagcaggcgttccgcgagggcaaacagagccagttcccgctgcgtgagacgctgcagcagtttcgcagcatctgtttcggccgcttcgatctgattcggatgtttctggaaattcagattcaggcggcgttcgccgacggctcgctgcacccgaacgaacgtcaggtactgtatgtcatcgccgaagagctgggcatttcgcgcgcgcagttcgatcagttcctcagcatgatggagggcgggcgtcagttcggcggcggtcagcagggcgggtattcgcagggcggctatcagcaggctcagcgcggcccgacgctcgacgatgcgtgcaaggtgctcggcgtgcgcagcagcgacgatgccgccaccatcaaacgcgcctaccgcaagctgatgagcgaacaccatccggataagctggtggcgaaaggcttgccgccgcagatgatggaaatggccaagcagaaagcgcaggagatccaggcggcgtacgacctgatcaaacgcgagaaaggttttaaataacgatacccgtcatacttcgagctgcaggtgtgttggctgcccgcgcttaccccggtcgcgtactttttgtacgctcccggggctgcgcttagttgccgccttcctgcaactcgaattatttagggtatctcagggtgatgagctcagaaatccggctcggcgcgaaagtgcatcggcgtctggaaggcggggtgggtgatgcgcagctcttgcgcatgcagctgtagccgtggcgccatcgccttagcctccggcggggcgtagaaaccgtcgccgaggatcgggtgccccagcgccagcatgtgcacccgcagctgatgcgagcggccggtgatcggcgtcagcttcacgcgcgtgctgccatcggcgtctcgcgacagcaccagatactcggtttgcgccgctttgccggtgtcaaaacacaccttttgcagcggccggttcggccaatcgcagatcagcggcaaatccaccagtccttcgtcatgttccatatgctcccaaacgcgggcgatataggatttcttcggctcgcgttcgcggaactgacgcttcagctcacgctcggcggccttgttgagcgccaccacgatcaccccgctggtggccatgtccagccggtgcaccgattcggcggccggatgatcggcctgaatgcgggtcatcaggctgtctttgttttccggcgcgcggccgggcaccgacagcaagccgctgggcttgttgaccaccatgatgtgttcatcctgatacaggatgtgcagcgggtcctgcgggggattgtagggttccatcttggctccgcgaaaagggccgaccggggagacggtggcctccccatgtcgcgccggttactggtgggtgaccaccaccagacgaatggcgtccaggcgccagccggcttcattgaggttggccagcacctgacggcggttgaactccagcgcttcgacttcgtcgtcgcggatgttcgggttgaccgccttcagcgcttccagacgcgccagctcggcgctcagcttgtcgtccgcctcttgcttcgcttgttcgataagcgtgcgcgcctgcgcttccaccaggctttccgcctgctgcagcatggcgtgcacgtcttgctgcacggcattgaccagcttgctggaagtgtggcggttgaccgcgttcaactggcggttgaagctttcgaactcgacctgcgccgccaggttggtgcccttgcggtccatcagcatgcggatcggcgtcggcggcaggaagcgggtcagctgcaggtgcttcggcgcctgggcttccaccacgtacaccagctcaaccagcaaggtgccgaccggcaacgctttgtttttcaacagggacaccgcacagctgccggtatcgccggacaggataagatccagaccgttgcggatgatcgggtgttcccagctgacgaactgcgcgtcttcgcgcgacagcgcccgatcgcgatcgaaggtgacggtgcagccgtcctgcggcaggcccgggaagtccggcaccagcatatggtcggacggcgtgagcacgatcaggttgtcgctgcgatcttcctgattgatgccgacgatgtcgaacaggttgagcgcgaagcccaccaggttgacgtcgttatcttgctcggcgatggcggcggccagcgcctgggctttgtcgccgccgttggagtgcatctccagcaggcgatcgcggccctgttccagctgcgctttcaactggtcatgctgctggcggcaggcatggatgaattcgtccaggccttcctgctcggtcggcgcggccagatagccgatcaactgctcgtagcagctgtcgtagatggtgcggccggtcgggcaggtgtgttcgaaggcgtcgagcccttcgtggaaccagcggcccagcaccgcctgcgcggtgtgctccaggtaaggcaccatgatttggatatcgtgcatctggccgatacggtccagacggccgatacgctgctccagcagatccgggttgaacggcagatcgaacatcaccagctggctggcgaactggaagttgcggccttcggaaccgatctcggaacacagcagcacctgcgcgccttcttcttcggaggcgaagtaggcggcggcgcggtcgcgctcgatgatcgacagcccttcgtggaacaccgcggcgcggatcgcttcacgctcgcgcagcacctgctccagctgcagcgcggtgtcggctttggcgcagatcaccagcactttttcgttgcggttggccagcaggtaatccagcagccactcgacgcgcggatcgaagttccaccaggtggcgttttcgccttcgaattcctgatagatctgctccgggtacagcatgtcgcgcgcacgggcttcgacggactttttggcgcccatgatgccggacactttgatcgcggtctgatattgggttggcaatggcagcttgatctggtgcaggttgcggtgcgggaagcccttcacgccgttacgggtgttgcggaacagcacgcggctggtgccgtggcgatccatcagcatcgataccagctcctgacgcgcctgctcggcgttgtcgccttcgctgttggcggctttgagcagcggctcgatgtcctgctcgtcgatcagctcgcccagcaggttaagcttgtcgtcggccaggcgttcaccgctcagcagcagggtgacggcgtcggccaccggacggtatttctgctgctcggcgacgaactcgccgtagtcgtggaaacggttcgggtcgagcaggcgcaggcgcgcaaagtggctctgttgaccgagctgttccggggtggcggtcagcagcagcacgccggggatatgctcggccagctgttcgatcacctgatattcgcggcttggcgcctcttcgctccaggccaggtggtgcgcttcatcgaccaccagcagatcccactgggcgtccgccagctcttccaggcgctgcttgttgcggcgcacgaagtccagcgagcagatcaccaactgttcggtctcaaacgggttgctgctgtcgagtttggcttcggcgtagcggctgtcgtcgaacagcgagaagtagaggttgaagcggcgcatcatctccaccagccactggtgctgcagcgtttccggcaccacgatcagcacgcgttcggcgcgccccgccagcagctgctggtggatgatcatgccggcttcgatggttttgccgaggccgacttcgtccgccagcagaacgcgcggcgcatggcgctggccgacttcatgagcgatgtgcagctggtgcgggatcaggctggcgcgcatgccgcgcaggccggcgaacggcaggcgatactgctcgctctggtatttgcgggcgcgaaaacgcagcgcgaaacggtccatgcggtcgatttggccggcgaacaggcgatcctgcggtttgctgaaggtcagcttactgtccagcagcacttcgcgcatcgccacgccgctttcctgggtgtccaggcgggtgccgatataggtcaacagaccgttttcctctttcacctcttccacctgcagctgccacccctcgtggctgctgacggtatcgcccgggttgaacatcacgcgggtgatcggcgaatcgtttctggcatagaggcggttttcaccggtggcggggaaaagcagggtaatcatgcgcgcatccagcgccacgacggtgcccagtcctaattcgctttccgtgtcgctgatccagcgttgaccaagagtaaaaggcatatattgtcggctcgattctttgtaagtaagtcttgttaccgggcgggaagggccgcggcacctgtactgaacgtctgctaatcccggtttgttttaaatttggcgggcaatagccgttcacgccatgcagacgtcgcgagacggcagggctaagcgtggttcagttttgggaagggcgctatggtaatggaaggcggcgcgttcgtcacctgcaaaaccggatgatttttcttaacctggcgcaatctcaaaacagccccatctgcccggtgaccagcgtggtgaaatcgtcgtgcaagaaagggagtatagcgtctgccaccggttgcagctgccgttcaaggtagtgctgataatcgatgggcgaatggcgggtttccagcggttccggcccggccacggtcatcacgtagctgatccagccgccgttctgatactgcagcggccgcccctggctgcggttgtagtcgtcggcgatgcgcgcggcgcgggcgtgcggcggcacgttgcgctgatagtcatcgagctttctgcgcagccgtttgcggtacaccagttgatcgtcgaagtcgccgttcagggttttgccgacgtaatcgcgcacatagtcctggtagggctgttgtttgaagatacgctgatagagctgctgctggaactgctgcgccagcggcgtccagtcggtgcgcaccgtttccagccctttgtacaccatctcttcctcgccgtcggcgcgcgcgatcaggccggcgtagcgttttttgctgccctgttcggcgccgcgaatggtcggcatcaggaagcgggaatagtgggtttcgaactccagttccagcgcgttctccagcccgaactgctgcagatgctgttgccaccaggcgttgacccgctgcaccagcgcccggccgatctgcgccgcctgctgctcgtcatgcggctgtttcagccacacgaaggtggagtcggtgtcgccgtaaatcacctgatagccttcggcttcgatcagctcgcgggtttggcgcatgatctcgtggccgcgcagggtgatcgacgacgccagccgcggatcgaagaagcggcagccgctcgatcccagcacgccgtacagcgcgttcatgatgatcttcagcgcctgcgacagcggcttattgtgctggcgtttggcggcctcgcgcccctgccagatctgttcgacgatcgccggcaggcagtgtttactgcgcgagaagcgggcgttgcgaaagccgggcaccgagtcggcgtcgcttgggtggcgcatgccttccaccagcccgaccggatcgatcaggaaggtgcggatgatcgacgggtacaggcttttatagtccagcaccaacaccgaatcgtacaggccgggccgggaatccatcacaaagccgccggggctgtgttcctccggctgttcgccgaggttgggggcgacaaagcccaggcgatgcatgcgcggcatatagaggtggctgaaggccgccaccgatccgccgctgcggtcggccgccagcccggtgacggtggcgcgctccagcaggaagttgagcaggtcggccttggcgaagatgcgcgtcaccagctcacagtccttcaggttgtagcgagccagcgccggcttgtcttcggcgaagcgccggtcgatctccgccatgcgttgataaggattgtcgatcgccttgccttcgcccagcagttcctgcgaaacgtattccagactgaaggagggaaagttccaggtggcggatttcagcgcctcgatgccatcgatgatcaggcggccggcggcggcggcgaaaaagtgattctgcttgaagccgtgctcgcgccactccagcaggttgccgccgcgccccagccgcagcgggatttggtagcgctcggcgtgcttttgcagcacccgcagatcgaactgcaccaggttccagccgatgatggcgtcaggatcgtggcgctccagccaggcgttcaaccgttccagcagctgggggcggctggcgcagtattccagatcgaaatccagcggctcatcgccgccgttggccggtcccagcatgtagacctgccgctggccgcagccttccagcgcgatggagtaaagctcgccgtgggcggtggtttcgatatccagcgacaccagttttagcgttgggcggtactccggcgccggcttcatttggccgctgagcaacggcccattgccgtcgccctggccgttgaaccacaccggcgcggtgatgaagcgttccatcaggtagcgctccggtgggcgaatgtcggcctcgtagaccgcaacgccgccttcccgcagcagtttttccagcttgatgagctgacggtgctggcggcagtacagccccagcatcgggcgatggtgaaaatccgtcagcgccagcggtttcagttcgacttgccgctcttcccgcagcagcagttccgcgcgctgcctttgttcggcggggataaacgccaccgaggtttgcggcggcaggcgtagctgacgcgggccggcgtcggtcgccagccagaattcgacctcggtgccggcgggcgtgtcgcgccagtggcgagtgagcaggaaaccctgttgcagtgctgtcataaccccttcgtcttccgccgggcggcgggcgcgacattcagcgagatgtcggttttggcgctaatatagataaattatagtatgggtttttatacagtgattgtccatcgccgcgcggcgttgccaaatacgcatacaattgatcgattgactcgtctgcggcggcactggaaaatcctccgcccgtttggcccgaataatccacagaggtgtaatggaagcctatttacaagatttgatcacccagtcactggctttcaccctgatggtcgttctgctggtcgcttttctggagtcgctggcgctggtggggctgctgttgcccggcacggtgatgatggccagcatcggcgcgttgatcggcagcggcaaggtggacttttactacgcctgggcggcgggcatcgtcggttgcctgctcggtgactggatctcctatttcgtcggccgcgcgttcaaggggccattacaccgttggtctttcctgaagaaaaacaaggcgctgctagacaaaaccgagcacgccttgcaccagcacagcatggcgaccattctgatcggccgtttcgtcggcccgacgcgcccgttggtgccgatggtggctggcatgctcgatctgccgccgtacaagttcgcgctgccgaacatcatcggttgcctgacctggccgccggtctatttcttccccggcattctggcgggcgtggcgatcgatattcccgccggcgccgacagcgcgatgttcaagtggctgctgcttgcggcggcgctgctggtctggctggcggtatggttgagctggcgctggtggcgcgagggcaagcgcagcgccgatcggctgagccgttggctgacaccgctgcggctgcgcgtggtgtgcggattgagttggctggcggcactggcggccggttatgcgctgagccagcagcctctgatgccggtgtatcgccacctgctgtggcaggtgttgtccgggcaatgacaaaagggggcgaaagcccccgttcgccttactggaagaacgcttccagctgttcaaatacccgcacgtcttcgctgtggcgcttcacctgcagcacatcctccagcttttccacctggcttatcatctgctccagccgctgatcgtcggcgaccaatagccaaatgcggctctgttggccgtcgttcaatggcaggcacaaaatgccttcgacgttgaacgcgcggcgggcgaacagcccgcaaacgtgcgacatcacgccgggatggttacgcaccgccagctccaggatcacctggggtttatcttgtggttgcagcatggcttattctccaatcatgtcgatgttggcggcgcccggcggcaccatcgggaatactttttcgttgatatcgatcagcgcgtggatcaggcaggggcccgggcgttggatcgcctcggccagcgccgcctgcggatcttccgcggcgttcagatcgcaggtatccaacccgaatccggcggcgatcttcaggaagtcggtgcgcttcggataggcggcggcgaagatgcgctgttggtagaacagggtttgctgctggtgcaccagccccagcgcctggttgttcatcaaaatgattttcacgtccagatcgtgctcgaccgcggtggccatttcctgaatgttcatcatcaggctgccgtcgccggagaagcacagcactttgcgcttgggctccgccagcgccgcgccgatcgccgccggcagaccgaagcccatggtgcccaggccgcccgacgtcagccactggcgaggccggctcagcggataggcttgcgccacccacatctgatgttggcctacgtcggtggtgataatagcgctgtcgtccacgcagcgcgcggcggccagcaccaggccgtaatggctcagcggatcgtcggcgttgggcatgttgaacgggaattcgcgcttcaggtcgttgacggtgttcagccattcgctgcgcggctgcgtgtcgatctgcggcagcagctggtgcagcacctggccgacgtcggcatggatcgccacgttggcctgtttgaccttgcccagctcggcgcggtcgatatccacatgaatgatggcggcgttagggcagaactgctcggttttgccgattgcccgatcgtcgaaacgcgcgcccagcacgatcagcagatcggcttcctgcagaatgaagttggtgctgcgcgccgcgtgcatgcccagcatgcccagcgacagcgggtgttccaccggcatcgcgcccagcgccatcagcgtcatggtggtgggcagaccggcgcgttcggccagttccaccgcttgccggtgggcgtcggcgcagatgatgccgccgcccagatagaggatcgggcgctttgcccggttgatcatcgcggcggcctgcgaaaccagcgccggatcgaagctcggagcggcgtccggcacggcgatcggcggcagctcttccagcgtgatggtggcggtttgcacatctttcggcacatcgatccagaccgggccggggcggccggactcggcgatgcggaaggcgtcgccaatcacctgcggcagttcgcggatatcgcgcaccagatggttgtgcttggtgatcgggatggaaatgccgtaggtgtccacttcctggaaggcgtcggtgccgatcattgaggagggcacctgaccggtgatgcacaccagcggaatggagtcgagtttggcgtcggcgatagcggtgaccaggttggtggcgcccggcccgctggaggcgatgcacaccgccgccttgccgttggcgcgcgccatgccttgcgccataaagcccgcgccctgttcgtggcgcgccagcacgtggtgaatgcgggtgctttggctcagcgcgtcatacagcggcagcgcggcgccgccgggaatgccggcgacggtggtgatgccctgacgctccagcagatgaacgatcaattgtgcgccggtgaagctggtgcccggttgaggcgtgcccgaagttgccatgttcctgtcctttctcaaggccggtgagctttgctgggcagggtgctaaaacaagaaaccccgcccggtttgcgccggcggggtttgggaatcgatgcgttgattcggaccctacggcgcattgccgacgaccaccaccacacgcacgacgaccaccgcggctggtagcgcggtaactagtagggtcgaagtcagcgaggatgcgatcacagggaaccttatcatcagtaaaaaaagtcaggtttttataaaaacacaggcgcaaaattcgcacaacaggtttattggcgcagcataaaaaacgcgcgtcagatcacgctttgcccgaaatgcccagcacgcgcgcttcgggcgcgctgccgtccagcagggcctgcgtcgggccgtcgtagtagatgcggccgtcgaccaccagcagcgtgcgcggcgcgatgcgcgcggcgtcgtcgaggttgtgcgataccatcagcagcgtcaggttgcgctgttcgcataccgtctgcagcagttgcaacatctcgttgcgcagcgccggatcgagcgccgagaagggctcgtcgagcagcaggatcggccgttggcgaatcaaacagcgcgccagcgcggcgcgctgacgctggccgccggaaagttgcgacggcaggcgctccagatgctcttccaggccgacctgacgggcgatgtgcgcccgctgttggcgctgctgttcagtcaagcgcagtccgggatccaaccccagcccgatgttctgcgccaccgtcagatgcgcgaacaggttgttctcctgaaacagcatcgacaccggccgcttggccggcggcgaggcggtgtggtcttcgccattcagcagcagccggccgttggccgccggcagaaagccggcgatcaggctcagcaaggtgcttttaccggcgccgctggggccgagcaccgcgacgcgctcgcccggctggatgcgcagatcaaagcgcatcggcaggtgttcatacaggtaggtcagtttttcaagcgtcagcatggcggcccggtaagcgttcaatcagggtaaacaacaggaagcacagcagcagcaacagcagcgcggtcaccgccccgtcgttgctgcggtaggcgccaatctgctgatacaggtaaaaaggcagggtacggaaatgctcgttgccaaacaaggcgaccacgccgaagtcgccgatcgacagcacgcaggcgaaggccagcgcctgtgccagcgggcggcgcagggcgcgcagctcaatcagccgcagccgtcgccagccgcggatatccagcgacaggcacagcggattgtaacgttcggcgaggtcgcgcatcgggttctccaatacctttagcgcatagggcaccgccatcagcgcattggtgaggatcaccagcgcatagggcgactgcggcaaccccacggtatcgctcagcagcaggaagaagccggtggccagcacgatgcccggcatcgccaggatcaccatgccgctgagctccagcgcctggccgccgcgcagctgttgccgcagttttagctcacggctgctccacagcagcatcatcgtgagcgccacgcacagcagccctgcgccgagggcgatgcgcagcgacgtgaacagcgcctgccacagcaccggctggcgcagcacgctgaccatggcctgattggcgccgtcggcgatcaccgccagcagaggcggcagcagcagcaacagtgcggcggcgatcagcagaaaatcgccgacgcgtcgccacaggctgtcatccggattgcgccagcgctgggcgtgggtatgccccaccggcaatgcctggctcaggcgctgactgatcaacaccagcccgagacaacagcccagctggatcagcgccagcatggcggcacgccccagatcgtagtcgtaactcagcgcctggtagatcgcctgttcaatggtggtggcctgcggcccgccgcccagcgacagtacggtggcgaagctggcgaagcacagcatgaagatcagcgcgccgctcggcaggatttggcggcgcagcgccggccattcgacgaagcggaactgctgccagccgttcatgcccagttgggcggccagctggcgctgctctaccggaatgttctccagcgcctgcagcaacaggcgggtggccagcggtagattaaagaacaggtgcgccagcagaatgccctgcagaccgtagggcgagaaaccatactcgacgcccagccagccgcacagcgtcgccagccagccctggcgcccatagacgctgagcaggccgaataccgctaccagcaccggcagcaccagcgtcatggcgcacagccgcagcaacaactgccggccggggaaacggcggcgatagagcgcgcgcgccagcagaatggcgggcagcaccgaaatcagcgccgacagcagcgcctgcaggaaggtgaagcgcaccacgtgccacaggtaactgtcctgccacaggctgcgccagtcgctgtccggcgcgtgacgccacagtgaccccagcgccagcgcggcgatgagcaggatcaggccggcggccagcagccccggccagagccagcgggggatcagcggctgacggcggtttgccatgcccggatccaaccgccgcgttgtgtggccacctcttcggcgctgtattgcagcgcggtctgcggcacattcatctgctcaaagccgacgggcagcggggtgttgatcaccgggtacatccagttgccggtcgggatggtgttctggaatgccggcgtcaccatgaaccgcatgaaacgctcggccagctcaggctgtttggcggctttcagcttgcccgccacttccacctgcaggtagtggccttcgctgaacgtggcggcggcgtaaaggtcttttttctcttcgatcaggtggtaggcgggagaggtggtatagctgagcaccagatcgccttcgcctttcaggaacaggccgtaggcttcgctccagcctttggtgacggtgacggtcttcttcgccaactgctgccaggcggccggcgccttgtcgccatacactttttgcatccacagcagcaggccgagccccggcgtgctggtgcgcggatcttcgtagatcactttccagttgcggtcgccgctgaccagctcctgcaggcttttcggcgggttcttcagtttttctttgttgtagacgaaggcgaagtacccgtagtcgtaaggcacgaaggtcgcgtcctgccagccgcccggtaccgtcagcctggcggtatcgacgccgctcggcgcgaacaggccggtttgctgcgccgcctgcagcaggttgttgtccagccccagcaccacgtcggcggcgctgttcttgccctccatgcgcaggcggttcagcaacgagacgccgtcttccagcgccacgaacttcagttcacagtcgcattcggcctcgaaggcttttttcaccgccgggccagggccccagtcggcggcgaaggaatcgtaggtgtaaaccgtcagcgtcggcttggcgaacgccggcgcggcgcacagcagcaataagcagggcagatattttttgaccacgttgcactcctgaaaaataaggggcaagggcatctgagggggcgaggcggcgtcgccggttcgctgggctcaaatccctccgccggtattgaccggatcaggttcgacgggtgtgctctcagcggaaaatcaggcttattacgcggcccggttctccgcaccccgttgaaacggcgctattgtaaagattaaccgacttgggcgaaaggcgcttatgtctccggcggggcaaaccaggcggacttgaagtcgaaccagccgagggtgttcatccgcacgccgcgcatgctgcgctggccgtgcagctgcagccagtggtggaacagcggatgcagctggtggttgctgaccagacgctggcagaactccgccagcggcagacggttggcgcgccacagcgccgcgtcctgcgccagatcttcgttcatgcaatgctgcatcagcggcagttcgtacagcgtggcgaacagcgaaaactccagcggcagatagaagttggcgctgccaagccacagatcgctgcgcgcgtcgccctggtgccaggtggcgtaatccacgctttgcacgatcaggcggatgccgtgctgcgccagcagcggctcgatcgcctgacggatggcgtgaaactccgaatgctcattgaagtgggtcatcgtcagttcggtcagccccgccggtttgggctgctgcgccagcgcgcggttgtggtgccaacggggcagcaggccgtacgccggcgaccagtagcgttggtagagcggcccggcgtggctcagcagcgaaatgggattgatcaattcgcacagccagctgcgaatggcgggatcggcggccagcggggagcgccggtcgaacagcaggaaatagcagccctcttccagccggctttccagttcgttgttgccggtttcatcgccctgcagctgtacgccggaatgcaccagttcttcggagaactccggcagcacccagatattcacctcgtcgatcagcgcccggtagccaaaatagtcgtcgaaggcgtggatcttcatctggctggggagattgcgcactacgcgataggggccggtgccgatcggatggcgggcgaaatccggcagttcgcgccattcgcgcggcaggatcatggcgtgcacgctgcccagcagccagggcagccagtggtcggggctgcgcagatgcacgtcaatcacgaatggcgtcggcgaggtgacgctctctatatgcgagaacagcggttgcgaggtcagacgcgaaagagaagtaatgacgtccgccatctccagctcgcggccgtgatgaaaatggatcgccgggcgcaggtaaaatcgccagtgcagtggcgtcaacgcctgccaatggtgagacagatcggactccagttccccgttttcctcatttatgcgcgtcagaccgttgaagatctggcgcgccagatgggtttccgaacgccgcagcgccgagccgggcagcaggttgtacaactgccggtagtagagcacccgcaggatgtgtttcccctggcggaagctacgccccagctgcgacagcagcatctggcgcaccacatttttgtcgcccaccagttgcaccagctgatcgatgcgatcctgttccagcagctcctcggcccgctgttgctgcagcgccaggccggtgtagtggaaggttagccgcgaacgcttgccgcgccccgactccgcctgccaggtgagccagccttcccgctgcatggcgctcagcagggagcgcacgtggcgccgcgagcagctgagcacctccgccagatcctgcagcgtggtgtcggtggtttcaccgtggcagcgctgccacaggcggatgaactgctgctgcaatctggacgtggacataaaagaggaacgctcccgcttcaactcgtcaatttttctttccctatattacgccgataattttcatcaatgaaaggggagggcgtaatcatgaaagctttcttatccaggcagttctatcagcgctatttcagcgcggtgcgccgccagcgagccgactggctgagcgtggtgcccgaacaggcgcggctggcgatgctggcgcacctgacgcaatgggacattaaagagatgaccgataagcagtatcgcgagcacctgtaggggctgcggcaacaagtttctgagtaatggtgctgtttcaccagccagtggggtgacccactggtttttttatgcgcggtcatggcgatgcgcttgcatttttctcgccgtggcttaaggttctttcttctgctttgaggtcagggaagacgatatgcaacgcatgagccggttgtcactgagcattaaccccatctttgccgcattcctgctgatcgcttttctctccggcatcgccggcgcgttgctgacgccgacgctcagtctgtttctgaccaccgaggtcaaagtgcggccgctgtgggtagggctgttttacaccgccaacgccgtggccggcatcgtggtcagttttctgctggccaagcgctccgacacccgcggcgatcggcgccggttgatcctgctgtgctgcctgatggcggtcggcaactgcctgctgttcgcctttaaccgcgattacctgacgctgatcaccgccggggtgctgatgtccgccgttgccaacaccgccatgccgcagattttcgcgttggcgcgggaatatgccgacagcgaggcgcgtgaggtggtgatgttcagctcggtgatgcgcgcccagctttcgctggcgtgggtgatcggcccgccgctgtcgtttgcgctggcgctgaactatgggttcaccgtgatgttcctgatcgccgccgccaccttcgcggtttgcgtactgctggtagggtttatgctgccttcggtgccgcgtgcggcggagaataaggagctgcagggcgggatgtctgcgccgatcgcgcccgccagcgcctggcgcaatcgcgatgtgcggctgctgttcatcgcttcgatgctgatgtggacctgcaataccttgtatatcatcgatatgccgctgtatatcaccgccgatctcgggctgccggaagggctggccggggtgctgatgggcaccgccgccgggttggaaatcccggcaatgctgctggccggttattacgtcaaacgcttcggcaagcgcaacatgatgctgctggcggtggcggcgggcgtgctgttttatctcgggctgacggtgttggcgaccaagccggccctgatcgcgctgcagctgctcaacgcggtgtttatcggcatcgtcgccggtatcggcatgctctattttcaggatttgatgccgggccggccgggcgccgccaccacgctgttcaccaacagcatctctaccggggtgatcctggccggggtgctgcagggcgtgctggtggagaatttcggtcatggttcggtgtattggatggcggcgctgctggcgctggcggcgctcgggatgagcgccaaagtgcgtgaagtgtgaggttaaacgacggcattcttgatgcaagtcattgagaaggctaaaccgggcgctcaagctgaaggcatatggcgcgcgatcgttgcgcccacgcccgtctcgctattgagatgccgccctgtcgtttagaacagtgggaacgttatggataaactcacaccgctcaaaccgcttccttccctgtgcgcccttggcgccacgctgattatctggttcctcattcccgtgccggagggcgttgcgcccaacgcctggcagctgctggcgctgtttatcggcaccatcatcgccatcatcggcaaggcgatgccgatcggcgcggtctcggtgatcgccatcgctctggtggcggtaaccggcgtcaccaaccccggcaagccgggcgccgcgctggacgacgcgctcagcggcttttccaaccagctgatctggctgatcggcttttctattatgatctccctcagcctgaacaaaaccgggctgggcgcgcgcatcggctactatttcatctcgctgttcggcaagaagacgctgggcatcgcctacgcgctgacgctggcggaaaccacgctggcgccggtgacgccgagcaacaccgcgcgcggcggcggcatcattcacccgatcatgaaatcgatcgccgacagctttggttccaaacccgagcttaataccgccggcaagatcggccgctatctgtcgctggtgaactacaacattaacccggtcacctcggcgatgtttatcaccgccacggcgcctaacccgctgattgtcagcctgatcgccaaaggcacccacggcagctttgaattgtcctggtcaatgtgggcgatcgccgccctggtgccagggctgtgctcgctgatcgtgatgccgctggtgatttatctgctgtaccccccggaggtgaaaagtacgccggatgcgccgcgtttcgcccgcgaaaagctgcaggcgctggggccggtgacgctgccggagaaaattaccctcggggtgttcgcgctgttgctggtgttgtgggccggcataccggcgatgatcttcggcccggcgctggcggtcaatcccaccaccgcggcgctgataggcctggcggtgctgctggccaccggcgtgctgagctgggaggatgtgctgaagcataaaggcgcctgggacaccgtggtgtggttctcggcgctggtgatgatggccagcttcctcggcaagctggggctaataggctggctgtcgcaaaccgtcggcaacggcatcgaccgtatgggcatgagttgggtgggcggcacgatcttgctgaccctcatctatttgtattcacactatttctttgccagcaccaccgcgcacgtgacggcgatgttcgccgccttcttcgctgccggcatcgcgcttggcgcgccaccggcactgctgggcctgatcctggcgttttcttcctcgctgatgatgtcgctgacgcattacggcaccggcaccgcgccgatcatctttggctccggctacgtgacgctgggggagtggtggaaagcgggatgggtgatgagtgtaattaacctgctgatctggatagtgatcggcggcgcatggtggaagctgctgggctactggtgaggaaaaaattcacccgccgggcggcgggtgaaggggattaattcagaaacgccggctgctgcgcttcgtagcgggagatgtccgcttcgtgctgcagcgtcaggccgatgctgtccagcccgttgatcatgcagtggcggcggaagctgtctatttcgaacggatagcttttgccgccggcgttgaccgtctggttctccagatccaccacgaactccgtcccttcgttggcgtccaccagcttgaacagctcatccacctgctgctcgctcagcgtcactggcaacagctggttgttgaacgagttgccatagaagatatcggcaaagctcggcgcgatcaccactttgaaaccgtagtcggtcagcgcccagggggcgtgttcgcgtgaagagccgcagccgaagttctcccgcgccaacaggatgctggcgcctttatagcgcggtttgttcagcacgaacgccgggttcggctgctggccggcgtcgtcgaggaagcgccagtcgttgaacaggtgctgaccgaaaccggtgcgggtcaccttctgtaaaaactgcttgggaataatggcgtcggtgtcgacgttggccgcatccaaaggcaccactaagccggtatgttgagtaaatttagccacgttagccccttagtgaatatcacggatgtcagcgaagtgaccggcgacggcggccgcggcggccattgccgggctgaccaggtgggtgcgcccaccgcggccctggcgcccttcgaagttacggttgctggtggacgcgcagcgttcgcccggattcagacggtcgttgttcatcgccaggcacatcgagcaacccggcaagcgccattcgaagccggcttcaataaagattttgtccaacccttcggcttccgcctgggccttcaccgggccggagcccggcaccacgatggcctggacgccattggcgaccttgcgccccttggcgatcgccgccgccgcgcgcagatcttcgatgcgcgagttggtgcaggagccgatgaacaccttgtcgatcggcacttcggtcaatttgatacccggcttcaaatccatgtaggccaacgctttctcggcggaggcgcgctcgaccggatcgctgaacgattccggcgccgggatcgcctgattgacggcgatcacctggccggggttggtaccccaggtgacctgcggcgcgatctcttcggcgtgcagcgtcactacggtatcgaactgggcgtcggcgtcggacttcagcgtgcgccagtaagcgaccgcctgctcccagttttcgccggttggcgcgaactgacgccccttcaggtaggcgaaggtggtgtcgtccggcgccaccagcccggctttggcgcccatttcgatcgccatgttgcacagggtcatacgcccttccatgctcaatgcctcgatcgccttgccgcagaattccaccacgtggccggtgccgccggcgctgccggttttgccgatcaccgccagcacgatgtctttggcggtaatgccctcggcggcgtcgccggtgacttcaatcttcatggtcttggcgcggccctgtttcagggtctgggtcgccagcacgtgttccacttcggaggtgccgatgccgaacgccaacgagccaaaagcgccgtgggtggcggtgtgcgagtcgccgcagacgatggtcatgcccggcagcgtcatgccttgttcaggcccaattacgtgcacgatgccctggaacgggtggttcaggtcatacagcgaaacgccgaattccgcgcagttcttgatcagctcctgcatctggatacgcgccatttcgccgctggcgttgatgtctttggtctgggtcgacacgttgtgatccatggtggcgaaggttttgcccggctggcgcaccttgcggcccatggcgcgcaggccgtcgaacgcctgcggcgaagtgacttcgtgcaccaggtgacggtcgatatacagcaacggcgtttcgttcggtgcttcgtgcaccacgtgggcgtcgtacagcttctggtataaggtcttggccatgttatgccccctgagctacaaagcgggcgatgatatcgcccatttcatcggtgctgacggctttgccgtcaccggccagatcggcggtgcggtagccctgttccaacgcctggttgatggcgcgctccacggcgtcggccgcttcatcggcgcccaggctgtaacgcagcagcagagtggcggacaggatctgcgcaatcgggttggcgatgcctttgccggcaatatccggcgcggaaccgcccgccggttcgtacaggccgaagccttgctcattcaggctggcggacggcagcatgcccatcgaaccggtgatcatcgcgcactcgtcggacaggatgtcgccgaacagattggagcacagcagcacgtcgaactgggacggatccttgatcaactgcatggtggcgttgtcgatatacatgtgcgacagcgacacgtccgggtaatccctggcgacctgattgaccacttcacgccacagaatggagctttgcagcacgttggccttgtcgatcgacgtcaccttgtggcggcgcttgcgggcggattcgaaggcgatgcgcgcgatgcgctcaatctcgaaacggtggtatacctcggtgtcgaaggcgcgctcctgcatgccctggccttcacggcccttcggctggccgaagtagatgccgccggtcaattcgcgcacgcacagaatgtcgaagccgcgggcggcgatgtcggcgcgcagcgggcagaacgcctccagcccttgatacaggcgcgccgggcgcaggttgctgaacaatttgaagtgtttgcgcagcggcaacagcgcgccgcgttccggctgctcggccggcggcagatgttcccatttcgggccgcctaccgagccgaacaggatggcgtcggcctgctcgcagccggcgacggtcgccgccggcaacgggctgccgtggcgatcgatggcgatgccgccgacgtcgtactcggcggtggtgatgcgaatgtcaaagcgttgacgcactgcgtccaacactttgcgcgcctgagccattacttccgggccgatgccgtctccgggcaagacggcaatgtgataagtcttcgtcatgttcacaccgtttcctgattattttgatgtttgttttgctgcaggcgctgcttttctttttctacctgctgtgagcgccaaatattgttcaacacgtgcaccatcgccttggcggaggattcgacgatatcggtcgccagacccacgccgtggaagcggcggccgttgtaagagaccacgatatccacctggcccagcgcgtcgcggccatggcccttggcggtcaactggtacttcaccagctcgatcgggtagtcggtgatgcgattgatcgcctgataaaccgcatcgaccgggccgttgccggtggcggcttcggctttctcttcgccgccgcagatcagtttcaccgaggcggtggccatgatgctgctgccggactgcacgctgaagtaacccaggctgaagtgctccggctcttcctgctgtttgttgatgaaggccagcgcctccagatcgtagtcgaacacctggccctttttgtcggccagcttcaggaaggcggcgtacagggtatccaggttgtaatcctgctcctggtagcccatctcttccatgcggtgtttcaccgctgcgcggccggagcgggaggtcaggttcaactgcacatccttcaggccgatcgactgcggggtcatgatttcgtagttttcgcggttcttcagcacgccgtcctggtgaatgccggaggagtgggcgaaggcgttggagccgacgatcgccttgttggccgggatcggcatgttgcacagctggctgacgatctggctggtgcggaagatttcttggtggttgatgttggtgtgcacgttcatgatgtcctggcgcactttaatcgccatgatcacttcttccagcgaacagttaccggcgcgttcaccaatgccgttcagggtgccttccacctggcgggcaccggcctgcactgcggcgatggagttgccgaccgccatgcccaaatcgtcgtggcagtgcacggagatgatggctttgtcgatgttcggcacgcggtcatacagggtagtgatgatgccgccgaactggttcggggtggtgtagccgacggtatccgggatattgatggtggtagcgccggcgttgatggcggcttcgaccacgcgacacagattgtcgatcggcgtgcggccggcgtcttcacaggagaactccacgtcgtcggtgtagttgcgggcgcgttttaccgagcgcaccgccatctccagcacttcgtcgaacgagcgcttcagcttcgattcgatgtgcagggttgaggtggccaggaatacgtggatgcggaacgcttcggcgacgcgcagcgcttcggcggccacgtcgatgtctttgtccacgcagcgggccaggccgcagacgcgactgtttttgatttggcgagcgatggtttgcaccgactcgaagtcgcccggcgaagagaccgggaagccgacttccatcacgtcaacgcccattctttccagcgccagcgcaatctgaatcttctcttttacgctcaggctggcctgcagcgcctgctcgccatcacgcagcgtggtatcgaaaataatgacttgttggctcatcggtgcattccttatcgtgttgatttcacgctaagcgggcaaaaaaaaacccgcgcagtagcgcgggtttcttatgggtgatcggctgagtcagctccgaacgtcgtccacaggcataccgcgcaaacaagatgcgttgagtagtaggcctagtagacggtgagtacggatcataagggttcagcttctcttaaattgggtgtctgcctaatttgatacgtgattggcctggcgatgtcaacacctgattgaatgcggggacaatgcatcagcccattaactaaacagaggatcattcggcaaaaaaacgacgtcttagagaaaaaaatggggccagtttgcgtgctgcttagcataaacgaatcgaatatatactgcgctaattgcttctggatttcgttgcgttaagatttgtgatgaaaaaagcaagagggattaatcacggggagcaataaaataacattttcaatacaaatggtttaaatttaactcatatgaataattgattgttttagtcataatataacaaaataatgcgtttttacacaaagtgagcggtgtttttagatggtttgattgcttatgatgtgtttttatagtttgtctcatacagtgcggcgacgttgttcaattgtattaatcattgttgatacctaattattagtactacccaggtggcattcttctcgctgacggggaaagctgctgacatgtattccatatacgacttatatcgtgtagataacacgaggttttttatcgattgatgacggtaatggcaggatttgtcgtgcaaagataagacaatgcggcgtttcattgtttgtcgagcataaggattagattatttacacaggatttagtggagtgaaatatggctgaatatgattcagaaatcgccatggtcaaagagccggcggacatccatttgcgcagcgtcgatcttaatttactgacggtgtttgacgccgtgatgcaaatgcaaaatattacgcgagccgctaattcgttagggatgtcgcagccggcggtgagcaacgcggtagcgcgcctgaaggtgatgttcaacgacgaactgttcgtgcgctgcggccgcgggatccagcccaccatgcgggccaggcagctgttcgggccggtgcggcaagcgctgcagctggtgcagaatgagttgccgggatctgagtttgagccgctgaccagcacgcgagcgttctccctgtcgctgtgcagcccgctcgatttgcgtctgggcgccgggataatcaatcacgtcaaacagatagcgccgcagcttaacctgcaaataaagtcatacattaacaataatattgaacgtcaattgcgttatcaggacgtggagtttgtcatcggctacagccgtttcgagtcggcggagtttcgcagcctggcgatgttcgacgacgaattagtgctggcggttgcgcaggcgcacccgagaataggcgaggaggtgacgccggaacacatgctggtcgagcagcatgctgcggtttccctggaaagttttggatcgttcagtaaacctttttatttagacgagccgatgctgcgcgccgtgacgcagcagtgcacggatctttacagcgtgttgaatatggtgtcgcaaacggaaatggtagcgattgcgcccgcctggttggtgcgacagcagacggaggcgttgaaaataaaggcagttcctttatgtggcaacgataataaagccacctgctacctctcctggcatgaatcctcagagcgggataaaggccaccagtggatgaaatctgtcctgattgaggcgggtaacccaaagtaaagcgataaagatgggaaccatataaagataatattcaactgagcgtttttttctcatgataaaaactaagaactatctgcgtttttattaagatatttcttggttttgcggcgatagaataacttattctcaggataaatttgttcatttagcgaaaacaattaatataaattaatattctgatttttactttccagctggaattttaaactaactcgatgtggcggcccgaacgggccgcgttttatggccgccatcaaaccttttccttcccgttttgtccaacccatgaaagcgcgaaagccggcctgagttttggctcacacttctacgctgaaatcgcttttccccctgcctgagagtaggtagactgcgcggaaaaaagtaaacacgtgtaagctgagatgagggccgcaaggcatcgttcaggcttaactgtatgattcatttcaggcttagagcactatgatcactaatctgctgcaataccatttgatccatcgtatacagcatcaaatcacccaccgagccgatcgcacagcatttcgccaatggtcgcccaacggcgagtttcaactgacctggggagcggcggctgcccgcattgatcgcattgctgccgggctgctggcgctgggcgccgaagtgcaagaacgtatcggtatcttcgccaataacacggtggcctggtcgttgaccgatctcgcgatcctgcacctgcgtggcgtcagcgtaccgctctattccaccaatacgccggcgcaggcggccttcgtcatcaacgacgctgacattcgcatcctgttcgtcggcgagcaggcgcagctggatgccgccatcgcactgcgtggcgtctgcccacagctgagttatatcatcgtgttcgacgagggcgccgatctgcgcggctgcgagatcgcacaacacctgagcgccttcgagcgcgctgccgatccggcggcttttatcgctcaacgtcggcagcgcattgaagagtgcgacctgcaggatctctttaccctgatctatacctcgggcaccaccggcgaaccgaaaggggtcatgctggactaccgcaacctggcggcgcagctctacctgcacgatgagagactgacggtcggcgaagaggatgtgtcgctcagtttcctgccgctgtcgcacgtgttcgagcgtgcctggagcttctttgtcatgcattccggcgcgcagaatgttttcctgccgaacaccgactgggtacgggaagcgatggggcaggtgcggccgacgttaatgtgcgcggtaccgcgtttctacgagaagattttcagcgcggtgcatgaaaaagtggcgcgtgccccttggctgcgccgtgcgctgttccactgggcgatcgtctgcggggagcgcaagttcctgcaagagcgggccggcaaaccgttgggcaaactgttcgaactctctcaccgctgggccgacaagctggtattgagcaagctgcgcggcattctcggtggccgggtgcgtttcttgccggcggcgggcgccaagctggatgacaatgtgatcctgtttttccaggcgatgggcgtcaacatcaagtacggctacggcatgaccgaaacctgtgcgaccgtgtcctgctgggaagaggggcatttccgcttcggctctatcggtaaaccgctgccggaggtcgaggtgcgcatcggtgaagaaaatgaaattcaggtgcgcgggccgatcgtgatgcgcggctatttcaacaaaccgttggaaaccgccgcgacctttaccgccgacggctggctgaaaaccggcgacgccggggcgatcgatgaagagggcaatctgttcatcaccgagcgcctgaaagatttgatgaaaacctccggcggcaaatacatagcgccgcagatgctggaaggcacgctggcgcaggaccgctttatcgagcaggtggcgatcatcgccgatgcgcgcaagttcgtttccgcgctgatcgtgccgtgctttgagtcgctggaagagtacgcgaagtcagtcaacctgaaataccaggatcgcctggagctgctgcgcaacggcgagatcctcgcgatgttcgaaaagcgcctgcgcgagatgcaaaaggagctggcgcgtttcgagcaggtgaagaagttcacgctgctgccggcggctttttccatggagttgggggagctgacgcccacgctgaagctgcgccgcaaagtgatcctgcagcgctatcagcgcgaaatcgactcgatgtaccaggaacaggcctgacgccgccgccgggccatgtgcccggcgaaaaaaagcggcatatccatcacctgatttagttctgtaatttccctcctgttcgaaacaatgcctagcccgacaaccctgaggctagcgcattgtttttataaagctgcgatctccagccgcttggcaataaccccgccaccgttaagccattttgccgtttgcctgccccaaattctgacgttatgttaattcgatagcgacaacccataaaaactttggggcattgccccgcagcaggcgctacgttccggcgccagagaagaataagcaagcctggaggcaaacccatggagatgttgtcaggagccgagatggtcgtccgatcgttgatcgatcagggcgttaaacatgtattcggctaccccggcggggcggtgctcgatatctacgacgccctgcatacggtcggagggatcgatcatattctggtgcgccacgagcaaggggcggtgcacatggccgacggctacgcgcgcgccaccggcgaagtgggcgtggtgctggtgacctccggccccggcgccaccaacgccattaccggcattgccaccgcctatatggactcgatcccgatggtcgtcctgtcggggcaggtgcccagctcgctgatcggctacgacgccttccaggagtgcgatatggtggggatttctcggccggtggtgaaacacagtttcctggtgaaacgtaccgaagacatcccggcggtgttgaagaaggccttttacctggcttccagcggccgccccggcccggtggtgatcgatctgccgaaagacatcgtcggcccggcggtacggatgccttatgcctatccgcaggacgtgagcatgcgttcctacaacccgacggtgcagggccaccgcgggcagatcaaacgtgcgttgcaaaccatcctggcggccaaaaagccggtgatgtacgtcggcggcggcgcgatcaacgccggttgcgaaaccgaactgttggcgttggcggagcagctgaacctgccggtgaccagcagcctgatgggactgggcgctttccccggcacccatcgccagagtgtcggcatgctcggcatgcacggcacctatgaagccaacaaaaccatgcaccatgccgacgtgatcttcgccgtcggcgtgcgtttcgacgatcgcactaccaacaatctggccaaatactgcccggacgccaccgtgctgcacatcgatatcgatccgacctcgatctccaaaacggtggacgccgatatcccgatcgtcggcgatgccaaacaggtgctggtgcagatgctggagctgttggcgcaggatgacaaggcgcaggatcacgatgcgctgcgcgactggtggcagtctatcgaacagtggcgcgcccgcgactgcctgggctacgacaaaaacagcggcaccatcaagccgcaggcggtgattgaaaccctgcatcgcctgaccaaaggcgacgcctatgtgacctccgacgtggggcagcaccagatgttcgccgcgctctattatccgttcgacaaaccgcgccgttggatcaactccggcggccttggcaccatgggcttcggcctgccggcggcattgggcgtcaagctggcgctgccggaggaaaccgtggtgtgcgtgaccggcgacggcagcattcagatgaatattcaggagctgtccactgcgctgcaatataacctgccggtggtggtggtgaacctcaacaaccgctatctgggcatggtcaagcagtggcaggacatgatttattccggccgtcattcgcagtcttacatggattcgctgccggacttcgtcaagctggccgaggcttacggccatgtcggcatcgccatccgcacgccggatgagctggaaagcaagctggcgcaggcgctggcggaaaaagagcggctggtgttcgtcgacgtgaccgtcgatgaaaccgaacatgtctacccgatgcagatccgcggcggaagcatggacgaaatgtggcttagcaaaacggagaggacctgatcatgcgccgtattttatctgtcttgctggaaaacgaatccggcgccctgtcgcgcgtggtggggttgttctcccagcgcggttacaacatcgagagcctgacggtggcgccgaccgatgatccgacgctgtcgcgcatgacgatccagaccgtcggcgacgagaaagtgctggagcagattgagaagcagttgcacaagctggtggacgtgctgcgcgtcagcgaactggtgcagggcgcccacgtcgagcgcgagatcatgctggtgaagctgcaggccagcggctacggccgtgaagaggtgaagcgctgcgccgacattttccgcggccagatcgttgatgtgacggcgacgctgtatacggtgcagctggccggcaccagcgacaagctcgacgccttcctgagcgcggtgcgtgaagtggcggagatcgtggaagtggcgcgttccggcgtggtcggcgtgtcgcgcggcgacaaaatcatgcgctgagcgcgatctggcggcgaataatcggggcgcggcgtggctgcgccctttgtttttcggtattttttgcccgattgctggcacctttcggcaaaagcggttgctaggcagtgttttctgctgttagatcgcagaggctggattgaataaccgtacgggatgccatggttaatccgagcacagccttcacttctattttcagcgtcattaaggggttaatgtgaaactggatgaaatcgcgcgtctcgcgggcgtttcgcgcacgacggccagttatgtcatcaacggcaaggcgaagcagtatcgtgtcagcgataaaaccgtcgagaaagtgatggccgtggtcagggagcataactatcacccgaatgccgtcgcggcggggctgcgcgccgggcgcacccgttctatcggcctggtgatcccggatctggaaaataccagctatacccgcatcgccaactacctggagcgccaggcgcgccagcggggttaccaattgctgatcgcctgttccgaagatcagccggataacgaaatgcgctgcattgagcacctgctgcagcgtcaggtggatgccattatcgtctccaccgccttgccgccggaacatcctttctatcaacgctgggccaacgatccgctgccgatcatcgcgctggaccgtgcgctggatcgcgagcatttcatcagcgttgtgggcgccgatcaggaagatgcctttgcgctggcgcaggagctgcgcaccttcccggctgaatcggtgctgtatctgggcgccttgccggagctttcggtgagcttcctgcgtgagcagggcttccgtcaggcctggcaagaggatccccgccacgtcgattacctgtacgccaacagctatgaacgcgaagccgccggcgcgctgtttgccgaatggctgaaaacgcacccgatgccgcaggcgctgtttaccacgtcgttctctttattgcagggcgtgatggacgtgacgctgaagcaacgcggccgcttgccgaccgatctggcgatcgccaccttcggcgatcatgaactgttggatttcctggagtgcccggtattggcggtagcgcagcgccatcgcgacgtggccgagcgcgtgctggaactggtgctggccagcctggacgaaccgcgtaaacccaagccggggctgacgcgcattcgccgcaatctgttccgccgcggcagcctgagccgcaagtagtttgcctgacaggggcccgcgttggcgggctcctgctttagacgtagtccgccacccggaacagccgccggcagtattccaggaaatagccatacaccacgcccatcgccatggataccagcgcattgctggttaccgccgccagcatttgttggccgtcggcgcctacgctccatagaatggcggcataaaccggcgactggaagctgacgtaggccagcagatcggcgaggttgcgcagcaggaactggccgcgcgggcagcggcgcgccgtgcggataaacagatcgcgatagcggccgtaaggccaggcgatcaggatgttgaccgggatcgacaacaggcgtgaagagagggattgctggaagctcatgcctgagatcaacacttctatcgccatgccggcgataaagcaatacaccaccagtgcgaacgtatcggcagcggcgctacgccagtgagtagcgggcgaaagcatgtgtcaccccttatggttaaaactctgttaaatcattcgttgttggatgttaaggctggttttttgccttttttatagtgtactcatctggattatgttttttaactaggtttatatttttatttttaacatttgttcgctttttgtcccgcagaacaggggcgtaggatggagcggagagattaaaatcggcgtttttaaataaatcgattaaaaacataaggttgcgatttttcgtttttgaaggggattttttccggcaaaaattgtggaaataaaggtgtaagaaaatgaaaccataattgtaaacaggtattttgggaataatcttaccaagttgatttgaatcgaaattacttctgctcgtaatatccgagccatttatttttatcgcggcctcatcacggcggtgcaaattgaagtaaaatagcgcccggttttacggtgaataacgattgagcgttattaactcaaggagttatggccttattccgcgatcggttcgcctggcgccgagccttggcgggcgcggctcgccagcggttaccgccctgagattgccgagctgaaaaatgagacatggcttgcagaaggaagtaatgagttaattaatcgccagttcgtcaggtttttaatcagattctttccgcttagaaaattctctccgtttatcatggtgttaatttttaatcgtcgaataatcagagtttctttcgcgagtcagctcccaaaatgaccagagaaatattgccaaagcgctggcgctctggcttgacaaggttttcataccctccgtaaactccattgtgtgggaatttgtggggtaaagtggtgaaaacggtcactaaggggtagctcaggaatgttccgtggagcgacgatggtcaacctcgacagcaaagggcggctcgccgtacctacccgatatcgggaattgctcaacgaggaatcgcaaggccaaatggtctgtaccattgacctccatcagccctgtctgctgctttatcctttgcccgaatgggaaattattgaacaaaaattatcacgtctgtcgagcatgaatcccgccgagcgccgcgttcagcgcctgctgttggggcatgccagtgagtgtcagatggatagtgccggtcgtttgctgttagccagtacgctgcggcaacacgccgggctcacgaaagaagtgatgctggtcggtcagttcaacaagtttgaactgtgggatgaacagacctggtatcaacaagtcaaggatgatattgacgctgaacagtcggctcaggaaccgttgtctgagcggctacaggacttgtcgctataagcatgttggaaaactataaacacaccaccgtcctgctggacgaagccgtcaacggcctcaacatccgcagcaacggcatatatatcgacggtacttttggtcgcggtggccattctcgtctgattctgtcccagctggggccggaagggcgcttgctggcgattgaccgtgaccctcaggcgattgcagccgccaaatctattgaagatcctcgttttaccatcgtacacggcccattttccgagttgtcgcactatgtgcgggagcgcgagctggtgggcaagatcgacggcgttctgctcgatctgggcgtttcctcgccgcagcttgacgacgcggagcgcgggttctcctttatgcgcgatggcccgctggacatgcgcatggatccgtccaccggcctgtctgccgcggaatggctgatgaaggccgaagcggacgacatcgcctgggtgctgaaaacctttggcgaggagcgtttcgccaagcgcatcgcgcgcgccatcgtggaaagaaaccgcgtggagccgatgacgcgcaccaaagagctggcggatctgatcgccgatgccagtccgttccgggaaaagcacaagcacccggcgacgcgcagcttccaggcgatccgcatctatatcaacagcgagctggaagagatcgagcgtgcgctcgacggcgcgctggaagtgctggccccacagggccgtttgtcgataatcagcttccactcgctggaagaccgcatcgtcaaacgctttatgcgtcaccatagccgcggcgcccaagtgccggccggcattccgttgaccgaagagcagctgcgcggcatgggcggccggacgctgaaagcgctgggcaaaatgatgccgtcggaagcggaagtggcggacaacccgcgtgcgcgcagctcggtgctgcgcattgctgagaggatgcccgcgtgatcggcaacgaacgtcacggtctggttggggtcattggcggcgatctgctgcgcaacgccaagatccccctgattttactgattgcgtcactggtctccgcgattttcgtggtgactaccgcgcaccgcacccgcctgctgaccgccgagcgcgaacagctggttctggagcgcgatgcgctggacatcgagtggcgcaacctgattttagaagagaacgccctcggcgatcacagccgggttgaacgtatcgcgacagaaaaactgcagatgcaacacgttgatccatcgcaggaaaatatcatcgttaaacaatgaatggtttaaccggaataatgacacggagtagaaaggaaacgcatgaaagcagcgcgccccggtaagttgagacgccaggaagatcaggccagctttgtcagctggcgttttgcgttgctgtgcggctgcattttgctggcgatggttggcctgatgttgcgcgtcgcgtacctgcaggtcatcaaccccgatcgtctggtgaaagaaggcgacatgcgttcgctgcgcgtgcaggaagtgccgaccgcgcgcggcatgatcagcgatcgcgccggccgtccgttggcggtcagcgtgccagtgaatgcggtgtgggccgatccgaaagagctgaacgagcgcggcggcatcacgctggatagccgctggaaagcgctttccgatgcgctgaacatcccgctggaccaactctccaaccgcatcaacgccaacccgaaagggcgcttcgtttatctggcgcgccaggttaacccggcgatcggcgactacatccacaaactcaagctgccggggatctacctgcggcaggagtcgcgccgttactatccggcggggcaggtgacgtcgcacatcatcggcgtgaccaacatcgacgggcaaggcatcgaaggcgtcgagaagagcttcgaccgctggctgaccgggcaaccgggcgagagaacggtgcgtaaggatcgtttcggccgggtgatcgaagacatctcctccgtcgacagccaggcggcgcacaacctggtgctgagcgtcgatgagcgcctgcaggcgctggtgtatcgcgagctgaacaacgccgtggcgttcaacaaggccgaatcgggcactgcggtgctgatcgacgtgaacaccggcgaagtgctggcgatggccaacagcccgtcttacaacccgaacaacatggccggtacgccgaaagaaaccatgcgtaaccgcgccatcaccgatatttttgaacccggttcaaccgtgaagccaatggtggtgatgaccgcactgcaaaacggcgtggtgagagaaaacagcgtgctgaacaccatcccgtatcgcattcagggccacgagatcaaagacgtggcgcggtactcggagctgtcattgaccgggatcttgcagaagtcgagtaacgtcggtgtttcaaagctggcgttagcgatgccgtcctcagcgttagtagatacttactctcgttttgggctgggaaaagcgaccaatttggggctggtcggagaaagcagtggcatatacccaaaaaaacaacggtggtctgacatagagagggccaccttctctttcggctacgggctgatggtaactccgttacagttggcgcgagtctatgcaacgatcggcagcctgggcgtgtatcgcccattgtcgatcaccaaggttgaccctccggtcgccggcgagcgcgttttccctgaacctctggtgcgcaccgtggtgcacatgatggaaagcgtggccttgccgggcggcggcggcgtaaaagccgccatcaagggataccgtatcgccatcaaaaccggtaccgcgaaaaaagtgggcccggacggcaaatacgtcaaccgatacatcgcttataccgccggcgtcgcgccggcaagtaacccccgttttgccctggtggtcgtcatcaacgacccgcagggtgggaaatactatggtggcgcaatctccgcgccggtgttcggcgccatcatgggcggcgtattgcgcaccatgaacgtcgagcctgacgcgttgcccaccggtgacaaaagcgaattagtgattaacaagaaagagggttcaggtggcagatcgtaatttgcgcgacttactcgccccgtgggtgccgacggcacccgggcgcgcgctgcgggaaatgacattagacagccgtgtggcggctgccggggatctgtttgtcgccgtggtcggccatcaaacggatgggcgccgctatattccgcaggccatcgcgcagggcgtcgccgctgtgatcgccgaggctgacggtcaggccgaagacggcgccatcgttgagatgcacggcgtgccggtgatctacctgagccaactgaaccagcgcctttccgcgctggccgggcgtttttaccatcagccgggcgagcgcttgcgcctggtcggcgtgaccggcaccaacggcaaaaccaccaccacgcagctgctggcgcagtggagccaactgctgggcgaaaccagcgcggtgatgggcaccgtcggcaacggcctgctgggccaggtgtgtccgaccgagaataccaccggttctgcggtggatgttcaacacgtattaaacgagttggcggaacagggcgcgaccttcgccgccatggaagtttcttcccacggtttggtgcaacaccgggtagcggcgctgccgttcgctgcggcggtcttcaccaacctgagccgcgatcacctggattaccacggtgatatggccaattacgaagcggccaaatggtcgctgttcgccgcccacaacgtggggcaggcgatcatcaacgccgacgatgaagtcggtcagcgctggctcggcaaattgccggatgcggtagcggtgacgatgcaggacaacctgcagccgggctgccacggccgctggctgaaaaccacggcggtcgactatcacgacaacggcgcgactgttcgtttcagctccagctggggcgacggcgagatcgaaagccgcctgatgggcgcgttcaacgtcagcaacctgctgttggcattggcgacgctgctgtcgttgggctacccgctggaggcgctggtggaaaccggcagccgtctgcagccggtctgcggccgcatggaagtgtttaacgcgccgggcaaaccgacggtagtggtggattacgcccacacgccggatgcgctggagaaagcgctggaagccgcgcgtctgcactgccaggggcagctgtggtgtgtgttcggctgcggcggcgatcgcgacaagggcaagcgtccgctgatgggcggcatcgccgagcagttcgccgatcgcgtggtgatcaccgatgacaacccgcgcaccgaagagccgcgcgcgattatcaacgacatcctgaccggattgctggacgccgggcaggcgctggtgatccacggccgcgccgaagcggtgaccagcgccatcatgcaggcgcaggagcaggatgtggtgctggtggcgggcaaaggccacgaagattatcagctggtgggcaaccgccgcctggattactccgaccgcacgacggtcgcccgactgctgggggtgctggcatgatccctgtctctcttcagacactggctgaggtattgagcgctgaactggtgggcgccgattgccaaattgtcgaggtgacgacagacacccgcaaggtgaccgccggttgcctgtttgtggcgctgaaaggcgagcgtttcgacgcgcacgacttcgcggcggatgccgtagccgcaggcgccggggcgctgctggtcagtaagcgcttatcagtggacgcgccgcagctggtggtgcaagacacccgtctggcgctgggccagcttggagcctgggtgcgtcaacaggtgccggcgcgcgtggtggcgctgaccggttcctcgggcaagacgtcggtgaaagaaatgaccgccgccattctgcgtgaatgcggcgaagtgctgtataccgccggcaacttcaataacgacatcggcgtgccgctgacgctgttgcgtctggagccgcagcatgattttgccgtgatagagctgggcgctaaccacattggcgaaattgcttacaccaccgcattgacgcgtccgcagaccgctttggtgaacaacctggcggccgcgcacctggaaggcttcggctcgctggccggcgtcgcccaggcgaaaggtgaaatctttaccggcctgccggccgacggcgtggcgatcatcaacgccgataacaacgactggccgcactggcagagcatgctgggcggcaaaaccgtctggcgcttctcgccgcaggcggccgaaggcgtggacttcttcgcggacgaggtgcgggtgaacggcgcaggcacgcagtttacgctgcacagcccgttcggcagcgccgagatcgcgctgccgctgccggggcgccacaacgtggccaacgcgttggcggccacggcgctggcgatgtcggtaggcgcccccctggaagcggtgcgtcaggggttaaaacaattgcaggcggtgccggggcgtttgttcccggtggcgctggccgaaggcaagctgctgctggacgacagctacaacgccaacgtcgggtcgatgaccgcggcggcgcaggtgctggcggagatgccgggctaccgcgtgatggtggtcggcgatatggccgagctgggcgcagaagcggaagagtgccaccgtcaggtgggcgaagccgcccgtctggccggggtcgacaaagtcatcagcgtcggcgggttgagccgcgtgctgagcgaagcctccggcaatggcgaacattatcaggacaagacagcagtgatcgcgcgcgtggcggaattactgtcggaacatgcggtcatcaccgtgttaatcaaaggttcacgtagtgccgcaatggagcaggtagtacgcgcgttacaggagaaagcaccatgttagtttggctggccgagcatttggtcaagtattactcaggcttcaacgtcttttcttatctgacgttccgagccattgtcagcctgctgaccgcgctgttcctgtcactgtggatgggcccgcgggtgatcaagcgtctgcaagaaatgtccttcgggcaggtggtgcgcaacgacggccccgagtcgcacttcagcaagcgcggcacgccgaccatgggcggcatcatgatcctgacctccatcaccatttcggtgctgatgtgggcctacccgtccaacccgtatgtctggtgcgtgctgttcgtgctggtgggttacggtattgtcggtttcgtcgacgactaccgcaaggtggtgcgtaaggacaccaaagggctgatcgcccgctggaagtatttctggcagtcggtgattgcgctgattgtcgcattcgccatgtacgccgtaggaaaagacacgccagccaccgagctggttgtgccgttctttaaggacgtgatgccgcagctgggcctgctgtacatcctgctggcctatttcgtcatcgtcggcaccagcaacgcggtcaacctgactgacggcctggacggcctggcgattatgccgacggtattcgtggcggccggtttcgcgctggtggcctgggcgaccggtaacatgaacttcgccaactacctgcatattccgtatctgcgtcatgccggtgagttggtgattgtctgcaccgccatcgtcggcgccggcctcgggttcctgtggttcaacacctacccggctcaggtgtttatgggcgacgtcggttcgctggcgctgggcggcgcgctgggcaccatcgcggtgctgctgcgccaggagttcttgttggtgatcatgggcggcgtgttcgtggtagagacgctgtcggtgatcctgcaggtgggatcgttcaagctgcgcggacaacgcattttccgcatggcgccgattcaccaccactatgaattgaaaggctggccggagccgcgcgtgatcgtgcgcttctggatcatttcgctgatgctagtgctgattggcctggcaacgctgaaggtgcgttaatcatggcagactatcagggtagaaaagtcgtcatcatcgggttgggcctcaccggcctgtcctgtgtcgatttcttcatggcgcgcggcgtgacgccgcgcgtgatggatacccgtatcgcgccgccagggttggacaaactgcctgaaagcgtggagcgccatctgggcgatctgaaccaggactggctgctggcggcggatctgatcgtcgccagcccgggcgtcgcgctggcgaccccggcattgagcgccgcggcggaagccggcgtggaaatcgtcggcgacgtcgaactgttctgccgcgaggcgcaggcgccgatcgtggcgattaccggctccaacggcaagagcaccgtcaccaccctggtgggtgagatggcgaaagccgccggttgggcggtgggcgtgggcggcaatatcggcctgccggcgctgagcctgttgcgccaggaatgtcagctttacgtgctggagctgtccagcttccagctggaaacgacgcatagcctgcgggcggcggcggcgaccatcctgaacgtgaccgaagatcatatggatcgctatccgttcggcctgcagcagtatcgcggcgccaagctgcgcgtgtatgaaaacgccgcggtgtgcgtggtgaacgcggacgatgcgctgaccatgccggtgcgcggcgccgacgaacgctgcgtcagcttcggggcggatgtgggtgactatcacctgaaccgtcagcagggcgaaacctggctgcgggtgcgcggtgagaaggtgctgaatacgcgcgagatgaagctgaccggtcgccacaactacaccaacgccctggcggcgctggcgttggcggatgcggtcaatatcccgcgtgcctccagcctgaaggcgttgaccaccttcaccggcctggcgcaccgcttccagctggcctgggagaacaacggcgtgcgttggatcaacgattccaaagccaccaacgtcggcagcaccgaagcggcgctgaacggcctgcaggtggacggcacgctgcatctgctgctgggcggcgacggcaagtccgccgatttctcgccgctggcgcgctatctgcagggcgacaacgtgcggctgtattgctttggccgcgacggcgcccagctggcgcagctgcggccggaagtggcgacgctgaccgagaccatggagcaggcgatgcgcaccatcgccggccgcgtacagcccggcgatatggtgctgttgtcgccggcctgcgccagtctcgatcagttccgtaattttgaagtgcgcggcgatgagttcgcccgcctggcgcaggagcttggcggatgaaactacgcttgccgaacttcgggctgacagaacggctgaaagactgggtgaccggcgcgcgcgacaacgacgcggtcaacatggtgctgtacgatcgcaccctgctgtggctgaccttcgggttggcgatcatcggcttcgtgatggtgacctcggcgtcgatgccgatcggccaacgcctggcggacgatccgttcctgttcgccaaacgcgatgcgctgtacctcggcctggcgttcggcttgtctctggtgacgctgcgcatcccgatggaagtttggcagcgctacagcaacgtgatgctgctgatgtcgatcgtgatgctgctgatcgtgctggtggtggggagctcggtgaacggggcctcgcgctggatcgcgctcggcccgctgcgtattcagccggcggagctgtccaagctgtcgctgttctgctatctggcgagctatctggtgcgcaaggtggaagaggtgcgcagcaacttctggggcttctgcaagccgatgggcgtgatggtggtgctggcggtgctgctgctggcgcagccggacctcggcaccgtggtggtgctgttcatcaccacgctggcgatgctgttcctagccggcgcgaaaatgtggcagttcctggcgatcatcggctccggcgtgttcgccgtggtgctgctgattatcgcggaaccctaccgtatgcgccgcgtgacctcgttctggaacccgtgggccgacccgttcggcagcggctaccagctgacccagtcgctgatggcattcggccgcggtgagttctgggggcaggggctcggcaactcggtgcagaaacttgagtatttgccggaagcgcacaccgacttcatcttctccattttgggtgaagaactgggctatatcggtgtggttttagccctgttaatggtattcttcgtcgcttttcgcgcgatgtccatcgggcgccgcgcgctggagatcgaccaacgcttctccggcttcctggcctgcgcgatcggcgtgtggttcagcttccaggcgctggttaacgtcggcgccgccgcaggcatgctgccgaccaaaggtctgacgctgccgctgatcagttacggcggctcgagcttgctgattatgtcgacggcgatcgtgctgttgctgcgaattgattatgaaacgcgcctgaccaaggctcaggcgtttgtgaagaggtaagggatgagcgggaaacctaagcgtttaatggtgatggcaggcggtaccggcgggcacgtgttcccggggctggcggtcgcgcatcatctgatggcgcagggctggcaggtgcgctggctcggaaccgcagaccgaatggaagccgatctggtgccgaagcacgggatcgagattgattttatccgcatctccggcctgcgcggcaaaggcctgaaggcccagttgacggcgccgctgcggatctggcaggcggtgcgccaggcgaaagccatcatgcgcagctatcagccggatgtggtgctggggatggggggctacgtttccggccccggcggcctggcggcctggcagtgtggcatcccggtggtgctgcacgagcagaacggcatcgccggtttgaccaaccgctggctggcgcgcatcgccgccaaagtgatgcaggccttccccggcgcgttcccgaacgccgaggtggtgggcaacccggtacgtaccgacgtgttggcgctaccgttgccggcggagcggttgcaggggcgcgaaggcccgatccgcgtgctggtgattggcggaagtcagggcgcgcgcgtgctgaatcagacagttcctgaagtcgcggcgcgtttgggcgatagaattacgctctggcatcaggttggcaagggcgcgctggaaacggtgctgcgcgattacgaaagggtagggcagacgcagcacaaggtgaccgagttcatcgacgacatggccgccgcctatgcctgggccgacgtggtggtctgccgctccggcgcgttgaccgtcagcgaaatcgcggcggcggggctgccggcgatcttcgtgccgttcatgcataaggatcgtcagcagtactggaatgcgcgtccgctggaagaagccggcgcggcgaagattatcgaacagccgcagttcaacgccgatgtggtggccgaactgctggcgagctgggatcgcaagacactgctggccatggccgagaaagcgcgcgcggtcgccattccggacgccaccgagcgcgtggcggcggagctggtgcggctcgccaagtaacgagtgcaggggttcggtgcgccgaacctgaataaaagcaatgtgatgtagggccggggtaccggatccggattagagagagtgatgaatacacaacaactggcgaaactacgtactatcgtgcccgagatgcgtcgcgtccggcacattcactttgtcggcatcggtggcgccggcatgggtggtatcgccgaagtgttggcaaacgaagggtatcagatcagcggctccgacctggcgccgaatccggtgacccaacagctgagcgcgctcggagcgacgatttatttcaatcaccgtccggaaaacgtgctggatgcgagcgtggtggtggtctctaccgccatctccgccgacaacccggagatcgtcgccgctcgtgaagcgcgcatcccggtgatccgccgcgctgaaatgctggcggagctgatgcgttttcgtcacggcatcgctattgccggcacgcacggcaaaaccaccaccacggcgatggtctcgagcatttatgccgaagcccgcctggacccgaccttcgtcaacggcgggctggtgaaggcggcgggtacccacgcacgactggggtccagccgttatctgatcgcggaagcggatgagagcgatgcgtcgttcctgcatctgcagccgatggtggccgtggtcaccaacattgaagccgaccacatggacacgtaccagggcgacttcgagaacctgaagcagacgtttatcaatttcttgcacaacctgccgttctacggccgtgcggtgatgtgcattgacgatccggtggtgcgtgagctgttgccgcgcgtggggcgccataccaccacctacggcttcagtgaggatgccgatgtgcgcatcgaagactaccggcagattgggccgcaggggcactttaccctgagccgtcaggacaaaccgttgctgacggtgacgctgaacgcgccgggccgccacaatgcgttgaacgcagcggcggcggtggcggtagcgaccgaagaaggcatcgacgacgaagatatcctgcgcgcgctggcgggcttccagggcaccgggcgccgcttcgatttcctcggcgagttcccgctggaaccggtcaacggcaaagcgggcagcgcgatgctggtggacgattacggccaccatccgaccgaggtggacgccacgctgaaagcggcgcgcgccggctggccggacaagcgtctggtgatgatcttccagccgcaccgttatacgcgcacccgcgatctgtacgacgatttcgccaacgtgctgtcgcaggtggatgtgctgctgatgcttgacgtgtacgccgccggcgaagcgccgatcccgggcgcggacagccgttcgctgtgccgcaccatccgcagccgcggcaagctggatccgatcctggtttccgatgccgatagcgtgccggaaaccctggcgcagctgctgcaggatgaagacctggtgctggtgcagggcgccggcaacgtgggcaaaatcgcccgtaaactggccgagctgaagctgcagccgccgaagaaagaggaggagcaccatggctgataaagttgcagttctgctgggcggcacctccgccgaacgcgaagtttccctgcagtccggcgccgcggtgctggccgggttgcgcgaagccggtatcgatgcgcacggcgtcgacacccgcgatttcccggtgacccagttgaaagagcagggattcaccaaagtatttatcgcgctgcacgggcgcggcggcgaggacggcaccctgcaagggctgctggagttcctcgaactgccttataccggcagcggcgtgatggcctcggcgctgaccatggacaaatggcgcaccaagatggtgtggcagtcgatgggcttgccggtagcgccttacgtggcgctgaatcgccagctgtacctcggcgccgaaaaagcggcgctgctggcgcgcgtggcggatctcggtttgccgctgatcgtcaagccgagccgcgaaggctccagcgtcggcatgagcaaggtcaccgaaagcgcggcgttggcagcggcattggaagaggccttccgccatgacgacgacgtgctggtggagaagtggctgagcggcccggaatacaccgtagcgatgctgggcgaccaggtgctgccatcgatccgcatccagccggccggcgtgttttatgactaccaggccaagtacatttcggacgatacgcagtacttctgcccgagcggtttgagcgccgagcaggaagctgagatggcggcgttggcgctgcgcgcctaccgcggtctggactgcagcggctggggccgcgtcgacgtgatgcaagacagcgatggtcgcttctatctgcttgaggtgaacacctctccgggcatgaccagtcatagcctggtgccgatggcggcgcgccagtttggattaagcttctcgcagttggtggcgagaattttggagttggccgactgatatgtcgcaagctgccctgaatgcgcgcgatcgcgaggtggataacggcccgcgccgcagcaatggaacccagttggcgggaatgattttcctgctgatggtgttgggaacggtcgtgtggagcggttgggcggtgcttggctggatgaaagacgccagccgcctgccgctctcaaggctggtggtgaccggcgaacgccattacaccaccaacgatgatattcgtcaggcgatcctggcgctgggcgcacccggcacctttatgacgcaggatgtggacgtcatccagcagcagatcgaacgtctgccgtggatcaagcaggccagcgtgcgcaaacaatggccggatgagctgaagatccatctggtggagtacgtcccggtggcgcgctggaacgatttgcacatggtggacgccgagggcaaagcgttcagcgtaccggcggagcgggcgggcaagcagaagttgccgctgctctacgggccggaagggagcgagcaggatgtgctggaaggctatcgggcgatgagcgccacgttggcggccagcaaatatacgctgaaaatggcggcgatgaccgcgcgccattcctggcagctggcgctggacaacgatgtccggcttgagctggggcgcgatgaccgcaacgggcgtttgcagcggtttatcgagctttacccggtattgcagcagcagggccaggcggagagcaagcgtgtcagctatgtcgatctgcgctacgagtccggcgcttcggtagggtgggctccggtgttggtcgatccgcaggcgcttggcggtcagcaaaacagtaatcagcaacagaatcaggcacaggcaaaacaacaatgatcaagtcgacggacagaaaactggtagttggactggagatcggtactgcaaaagtctccgcgttggtaggggaagttctgcccgatggcatggtcaacattatcggggtgggcagctgcccgtctcgcggtatggataagggtggcgtaaacgacctggaatcggtggtgaagtgcgtacagcgcgccatcgatcaggccgagctgatggcggactgccagatctcttcggtgtacctggcgctgtcgggcaaacacatcagctgccagaacgaaatcggcatggtgccgatctcggaagaggaagtgacgcaggacgacgtggagaatgtggtgcacaccgccaaatcggtgcgcgtgcgcgacgaacaccgtatcctgcacgtgattcctcaggaatacgccatcgattatcaggaaggcatcaaaaacccggttgggctgtccggcgtgcgcatgcaggccaaggtgcatctgattacctgccataacgatatggcgaagaacatcgtcaaggccgtggaacgttgcggcctgaaagttgaccaacttattttcgccggtctggccgcgagctacgcggtgctgaccgaagatgaacgcgaactcggcgtttgcgtggtggatatcggcggcggcaccatggatatggcggtgtataccggcggtgcgctgcgccacaccaaagtgatcccttatgccgggaacgtggtcaccagcgatatcgcctacgccttcggcacgccgccgaccgatgcggaagcgattaaagttcgacacggttgtgcgcttgggtcgattgttagcaaggatgagaatgtagaggtgcctagcgtcgggggacgtcctccgcgcagtctgcaaagacagacgctggctgaagtcattgagccacgctacaccgaactgttgaatctggttaacgatgaaattttgcaattgcaggagcaactgcgtcagcaaggggtgaagcatcatctggcggcaggtatcgtgctgaccggtggcgccgcccagattgatggcctggcagcctgtgcgcaacgggtgttccacactcaggtacgcatcggccaacccttgaacatcacgggtctgacggattatgcgcaggagccttactactcgacggcggtaggtctgctgcactatggaaaagagtctcacctgagcggtgagacagaagtagaaaaacgcgcctcggtgggcaattggtttaaacgcatcaatagctggctgagaaaagagttttaatgtttcaacaaagagatcatgctgagtaatctttttatgatctcgcagcgacaggcacaaaacggagagaaactatgtttgaaccaatggaactaaccaatgacgcggtgattaaagtcatcggcgtcggcggcggcggtggcaacgccgttgaacacatggtgcgcgagcgcatcgaaggtgttgaattcttcgctgtgaacacggacgcccaggcgctccgcaaaacggcggttggccaaaccatccagattggtagcggtattaccaaaggtctgggtgcgggcgcgaaccctgaggtgggtcgcaattcagcggaagaagaccgcgaagccctgcgcgcagcgctggacggcgcagacatggtcttcatcgcagccggcatgggcggcggtaccggtaccggtgcggcgccagtggtggctgaagtggctaaagatttgggtattctgaccgtggccgtggtgaccaagcctttcaacttcgaaggcaagaagcgcatggcattcgcggagcagggtatcgctgaactgtccaaacacgtggactcgctgatcaccatcccgaacgacaagctgttgaaagttctggggcgcggcatctctctgctggacgcgttcggcgcggccaacgacgtgctgaaaggcgcggtgcagggtatcgccgagctgatcacccgtccgggcctgatgaacgtcgacttcgccgacgtgcgcaccgtgatgtccgaaatgggctacgcgatgatgggttccggcgtggcttgcggtgaagaccgcgccgaagaagcggccgaaatggcgatctccagcccgctgctggaagacatcgacctgtccggcgcgcgcggcgtgctggtcaacattaccgctggtttcgatctgcgtctggatgagttcgaaactgtgggtaacaccatccgtgcattcgcttccgacaacgctaccgtggttatcggtacctcgctggatccggaaatgaacgacgaactgcgcgttaccgtggttgcaaccggtatcggtatggacaagcgtcctgaaatcactctggtgaccaataagcaggccagccagccagtgatggatcaccgttatcagcagcacggcatgtcgcctctgccgcaggaagtgaaacctgccgccaaggtggtcaacgaccaagctgcgcagccgaataaagagcccgactatcttgatattccagccttcctgcgtaaacaggcagactaagaatatcctgagaatttggaatctccgctctttgtgctaaactgtcccgccggccatgctgtatgcttggctggtaggatggataacattgcgagataaaacgatgatcaaacaaaggacattaaaacgtattgttcaggcgactggcgtcggtttgcataccggcaagaaagtcacgctgacaatgcgcccagcgccggctaataccggggtcatctatcgtcgcactgacttgaatccaccggttgattttccggctgatgcaaaatccgtgcgtgataccatgctctgtacttgcctggtgaatgagcatgacgtgcgtatttcgaccgttgagcacctcaacgccgcgctggctgggctgggcatcgacaatatcgtcatcgaagtcgacgccgctgaaatcccaatcatggacggcagcgccagtccgttcgtgttcttgctgctggatgccggcatcgaagaactgaactcggcgaagaaattcctgcgtctgaaagagaccgtgcgtgttgaagatggcgacaagtgggccgagctgtccccgcataacgggttccgcctggacttcaccatcgacttcaaccacccggctatcgacgccagctctcagcgctaccgtcttgatttctcggctgagtcgttcgtgcgtcaaatcagccgcgcgcgcaccttcgggttcatgcgcgatatcgaatatctgcagtcccgcggcttggccctgggcggcagcttcgattgcgccatcgtggtagatgactaccgcgtgctgaacgaagacggtctgcgtttcgaagacgagttcgtacgtcacaaaatgctggacgccatcggcgacctgttcatgtgcggccacaacatcattggcgcgttcaccgcgttcaagtctgggcacgcgctgaacaacaaactgctgcaggccgtactggccaagcaggaagcgtgggaatacgtgaccttccaggacgaagccgaaatgccgttggcattcaaggcaccgtctaccgtattggcgtaaggtctgaattcctcgcctgctgcgaataacggcaggcgcatcctctgagagcctgagaattcaggctcgtgatgccgtctgatgttttgcagttgtgtcgctgattacttatcacgactggttgtgttggtaccctctccggccaatgcagccagccgttccaatatcttgcgcagtttctccgggctacggctcgccaatcccctcagctcttccgcactttccagactcaaatgacgcatcggcacggttttttccggcgctttctcggcgttttgcacctggttgctgcctttcgccatcaaggccggattaatcctgatgtcgatcgacgacaatgatggtagaatttgcgctcgtagtgcagacagcaaagcgggttgttcgtagcgcaagcgcatcatccaactggcatttgccgtttcgagcactaaaataccctgtcggaaattcgcgacgcggcaccagggatgcaggggagcgggcaacaggcccttcactgcacggttaagcttgagcagcgccaccgcgcgttgctggacgttatgcagcggccctttgctgccggcagacgcgtcgtcgaacaggacatctaataattgtggacggctatcgcgcataatgggctccggcggattataaactcgtgatcggtattctaaatcgttggcgacaatttggcagacgttatttctggccccatctcctgttagggatggttgcggccacgcttggcgcgtcttccaatttgtccggcgctcccgatcaggccgcactgccgaatacgtcgtccagccttaaccggcaaaattcggccaacggcaccttcaccagcctggccctgctgcaggacgcgcaccgccgccctaccttcagcgtagattattggcagcagcatgcactgcgcaccgtcattcgtcacctctctttcgcgctggcgccgcaggcggtttatgcgcgggtacaggagagcgaagtcgaagcggaaccgcctttgcaggtagcgcaactggcgctgctgtctaccctcaatgcgctgctgacgcatgagccgaagccaccgaccatcattcgtcacacccaccttgaggtgctgccaacgctggcgcggcaccagaccggcctgtgggtggctcaggtgcaaggcattcgcgccgggcccgtcgttctcgtctgactccgcccttagggcataaaaaccataaataatagcaagttgactgccgccttcggccgtcatgacagagatatcaaacatcatgttagtgaaattattaaccaaagtttttggcagccgtaacgatcgtaccctgcgccgcatgcgcaaagtggttgagcagatcaaccgcatggaaccggacatggaaaaactgtccgatgacgagctgaaagcgaaaaccaacgagttccgcgcacgcctggaaaaaggcgagtcgctggaaagcctgatcccggaagccttcgccgtggtgcgcgaggcgagcaagcgcgtgttcggcatgcgtcacttcgacgtgcagctgctgggcggcatggtgctgaacgaccgctgcatcgccgagatgcgtaccggtgaaggtaaaaccctgaccgcgacgctgccggcctacctgaacgccctgagcggccgcggcgtgcacgtggtgaccgtcaacgactatctggcgcagcgtgacgccgaaaacaaccgcccgctgttcgagttcctcggcctgagcatcggcatcaacctgccgggcatgccggcgccggccaagcgtgaagcttacgccgccgacatcacctacggcaccaacaacgaatacggcttcgactacctgcgcgacaacatggcgttcagcccggaagagcgcgtgcagcgcaaactgcactatgcgctggtggatgaggtggactccatcctgatcgatgaagcgcgtacgccgctgatcatctccggcccggccgaagacagctccgagatgtacatcaaggtcaacaagctgatccctaaactgatccgccaggaaaaagaagactccgacaccttcaagggtgaagggcacttctcggtggatgagaaggcgcgccaggtccacctgaccgaacgcggcctgatcctgatcgaagagatgctggtggaagccggcatcatggatgaaggcgaatcgctgtactcgccgaccaacatcatgctgatgcaccacgttaccgccgcgctgcgcgcccacgtgctgttcacccgcgacgttgactacatcgtgaaagacggcgaagtgatcatcgtcgatgaacacaccggccgtaccatgcagggccgccgctggtccgacggtctgcaccaggcggtggaagccaaagaaggcgtggagatccagaacgagaaccagacgctggcttcgatcaccttccagaactacttccgtctgtacgagaagctggccgggatgaccggtaccgccgataccgaagccttcgaattcagctcgatctacaagctggacaccatcgtggtgccaaccaaccgtccgatgatccgtaaggacatgccggatctggtgtacatgaccgagaaagagaagatcggcgccatcatcgaggacatccgcgagcgtaccgccaaaggccaaccggtgctggtgggtaccatctcgatcgagaaatccgaagtggtgtcccgtgagctgaccaaagcgggcatcgaccacaaggtgctgaacgccaaattccacgccatggaagcggacatcgtcgcccaggccggccagagcggtgcggtaaccatcgccaccaacatggcgggtcgtggtaccgatatcgtgctgggcggcagctggcaggccgaagtggcgctgctggaagcgccgaccgaagagcagatcgaagccgtcaaagccgcctggaaagagcgccacgacgcggtgctggcggcgggcggcctgcatatcatcggcaccgagcgccatgaatcgcgccgtatcgataaccagctgcgcggccgttccggtcgtcagggcgacgccggttcatcccgcttctatctgtcgatggaagatgccctgatgcgtatcttcgcctcggatcgcgtgtccggcatgatgcgtaaactgggcatgaaagaaggcgaagcgattgagcacccgtgggtgaccaaggcgatcgccaatgcccagcgtaaggtagagagccgcaacttcgacatccgtaagcagctgctggagtacgatgacgtcgccaacgatcagcgccgcgccatctacagccaacgcaacgaattgctggacgtgtccgacgtgagcgaaaccatcgccagcatccgcgaggacgtgttcaagagcaccatcgacaactacatcacgccgcagtcgctggaagaagagtgggatattcaggggctggaagagcgcctgaagaacgacttcgatctggagatgccgatcgcccagtggctggacaaagagccggagctgcacgaagagacgctgcgcgaacgcattctggagaacgccaaagagcagtatcagcgtaaggaagaagtggtcggcagcgagatgatgcgcaacttcgagaagggcgtgatgctgcagacgttggattctctgtggaaagagcatctggcggcgatggactacctgcgccagggtatccacctgcgcggttacgcgcagaaggatccgaagcaggagtacaagcgtgaatccttcaacatgttcgccaccatgctggaatcgctgaaatatgaagtgatcagcgtgctgagcaaggtacaggtgcggatgccggaagaggtggaagcgctggaacagcagcgccgtgaagaggccgagcgtctggtgcagcagcaacagctgagccaccacgacgagaacgcgctggtgactgaagatccgaacgcgccggcgaccgccgagcgtaaagtggggcgcaacgatccttgcccatgcggttccggcaagaaatacaagcagtgccacggccgcctgcagtaatgccggccgcggttaaccgataacacccaggggttcagcttgctgagcccctgttttttggcacccatcaggagggtgagatgaaacatctgaatatcgccgtgggcattatccgcaatgctcaacaggagatctttattacccgccgcgccgccgatgcgcacatggccggcttttgggagtttcccggcggtaagatcgaacagggtgaaacgccggaacaggcgttgagccgcgagctgcgggaagagaccggtatcgaaaccgaacgcgccgaactgctggaggtggtggagcaccgcttcagcgatcgcatcgtgacgctgaatttttatctggtagaagcctgggcgggtgagccgttcggccgcgaggggcaaccgatgcgctgggtaaaacaggtggacctgcgtgaagacgagttcccggaagccaacgtcggcattattcagctgctggtggcacaggcgaacgccgcgcaataaccagtttggcctggcgtccgccaggccaacagcgggcgatcagcgatcgtccatttcgctccagtcttcgctttccgacagatcgctgttgctcggaatgcgcttctcttcatcggcccactcgccgagatcgatcagctggcagcgtttgctgcaaaacggcctgaatgggctgacttcaccccaaaccacgccggtgccacaggttgggcattttactacggtcgtcataacggttccttatgccttctgacagtactgagaaggctttctttcataagttcaacaacaggccagttcgaacgtcaggcgttcaggcaccgcgccatgttcgctgtccagcggcaggaaacgaatggcataacgcgtcttatggccggaaatctgcggataaagctgcggcgccagatggaggcgcaggcgcagcagatccgccccttcggcgttgtcctggaaaaaaccgttcaggctgatttgattgcggaacggcccggattggcggatcagatccaacaccatgatcagtgcctggttcagcggatccagcgactgcagccaggcggcgacgtcggcatcgcgatcttgctgcggcgcgtgcatccacatgtgcagggtcggcagatcgaagctgcagcaaccgccaggaatgttcagccgctgacgcaccaggccgatcagccgatcttcgcgcagcgcctggccgaggcgcggcgccgccatcagcgccgatgagcgcgacttcagctggccgcgcagctggtcgatcagcgccatatccacgcccggcacatcggcccaggccaacagtttctgctgctggcgctccagctctttgagcagttcggtgcgcacttcgccgcgctccagcacgtccagcaagtcggaaacggtgcgaaagaaggtgagggcgatggcggtttcactcagggcgcgttggccgtgcagctgttgcagcaggaattcgatgcgcagccaggtgcgcatcttctcgttcagcgggtgttcaaagagaacggttggggaaacatcactcatgcagtttaatcctgttggggcgctgttgccgccagttcaaggtagcgacgatgcagagcggcgacctgtggctctatcccctgagcggcgccgctgttgtcaataatgtcatccgccacggcgaggcgctgctggcgcgtggcctgggcggcgagaatgctctgcgcttgctcacggcttacgccgtcgcgcgcgatggtgcgagccagctgggtttcggcgtcgacgtcgatcaccagcacccgatcggcgcgatcctgcaggcggttttccaccagcagcggcaccacccacagcgcgtacgggctggtggcctgcgccagttggcgctgggtttctcggtgtatcagcgggtgcagcagctggttcagccaggttttgtcatcgggatggctgaagatgcgctgacgcagcgcagcgcgatccaacgcaccgtccggcagcaacatttcattaccaaatcgttcggcgatcgcggccaaggcaggggtgcccggctcgacgacctgacgggcgatcacgtcggcatcgacaagggttgcgccgtggcgcgcaaaggcgttcgcgacggtcgtcttgccgctgcctatgcccccggtcaacgcaacaatgtaggccatggtgttaggtgcatccgatgttcataaaaaaataatagtcgaatcataaagcgatcgcgcagaagtgcaagtcggcaggcggcgcttgcgcatcggcaccgattgggtggcgagaaaaaacgcagcggcacggcaaaaatgagcgggcaatcacactgcgattatgcaggtaaatttgtcggattgtagcgtaaataaaggcgaattcgcagtcttgttcggcgattattagcgagtattataacgtcactggaactggcattaatctcgccgccgtctttttgcgccactggaaagccgtcgggtagaggttcgaatatcctccttgcgatccgtcgccattaaccaggaaatcataagtcatgcgtattgaagaagatttgaagttgggctttaaagacgtgttgatccgccctaagcgttccacgctgaaaagccgctccgaggttgaactggaacgtcagtttaccttcaagcattcaggttgcagctggtccggcgtgccgattatcgcagccaacatggacacggtgggcaccttccgcatggccgaggccctggcttctttcgacgttctcaccgccgtacacaaacattacagcgtcgagcaatgggctgacttcgtgcagcgcatgccggaatcggtgctgcgccatgtgatggtgtccaccggcacctccgaagccgacttcgccaaaatgcagcaaatcctggcgctgtctccggcgctgaaattcatctgtatcgacgtggccaacggctattcagagcattttgtcgccttcctgcaaaaagcgcgcgaagcctgcccgaaccacgtcatctgcgcaggcaacgtggtaaccggcgagatggtggaagagttgatcctctccggcgccgacatcgttaaagtcggcatcggcccggggtcggtatgcaccacccgcgtgaagaccggcgtgggctatccgcagctgtcggcggtgatcgaatgcgccgacgcggcccatgggctgggcggccaaatcgtcagcgacggcggctgctcggtgccgggcgatgtcgccaaagccttcggcggcggtgcggacttcgtgatgctgggcggcatgctggccggccacgacgagtgcgaaggcaccgtggtggaagagaacggcgagaagttcatgctgttctacggcatgagctctgaatcggcgatgaagcgccacgtcggcggcgtagcagagtatcgcgcggccgaaggcaaaaccgtcaagctgccgctgcgcggcgaggtggagtttaccgtgcgtgatatcctcggcggcttgcgttccgcctgcacctacgtcggcgccgagcgtctgaaagagctgaccaagcgcaccacctttatccgtgtggcggagcaggaaaaccgcgtcttcggcagcaaataagccgcagcttgcattcgggcgccgcgcaccgcggtgcccgctatcctcttctttatcccagcacgctgcccagttgaaagataggcagatacatggcgatcaccaaagcgccgacaatcccgcccaccaccagcatcaacagcggctccagcgtttgcgccagcgtatcggccagctcgtgcgtctgccgttcataccactgcgccaacttatccagcaaggcgtccagcgaaccggactcctcgcccacccgcaccagctgccggcacagtggcggaaacagcggttgcaaacccagggcctgatgaaacgcttcgccttcggcgatctgccgttgcacctgctccagcgcctgccggtacagcggatgatccgccgccagcgccgccgcgttcaagccttccaccagcgtcagccccgcgcgttgggtcatggtcaggatacgaaatgtttggctcagcgcgccgccgctcaccagccgggcaatcagcggcaggcgcagcaaggcggcctgttcgcgttggcgccacggagggcgcggatgcagccagcggcagtagccgaacagcaacgcgccgagcagcagcgccaaataggggcctacggcgatcagcagcgcggacaaccccaataatccttgggtaaaccagggcagctgcgcatcgaacgactgataaaccttggcaaattccggcagcaccatcaccagcatcagcacgctgaccagcagcgccaccgcgcagatgaagaggggataacgcagcgctttggtcaccttgcggcgcagcagcaactgggcctcctgttgttgcgccaactgcaggcagcagcgatcgaggttgccggtcagttcgccgatggcgatcagttggcgatagatcagtggaaaaacgcttggttgtgcggcaaggctttcggagagcggctgcccttcgcgcacctggtcggccagctggcgcagcaggcagcgccaggctgccgaaggatgctctgctgccagcaactgcagcgtattgaccagcggcagcccggcctgcaacagggtagcgagctggcgggtgaagtggattaagggttctccgcgccattggccgggcgtgacgcgtttgccgtgcccgatccgccaaggttgcaggccttgttcgatcagcagccggctcacctgccgtttttcctcgctcatcagttcgccgcggcgtaaggtgccctgagcgtcgaaagcttgccacagaaacaaccggcgcgctttcatggcgtggttacgccgagttggacgacgtcgatcacgcggtacagttcttccagcgaggtcgtgccttcggcggccagcgccagacccgcctgcagcagcgaaagctgcccctgttcgcgggcgatatccgccagcagactgggagcggcgttcgccagcaatgccgcctgaatttccggcgtaatggccaacagttcatacacgccgatgcgcccataatagccgccgaagcagtgctcgcagccgtcggcgcgccaggcggtcagcggttccggccagagcgcggtgggaaaatgcgccggctggctttgcgggtagcggcagtggcgacacagcctgcgcaccagccgctgggcgacgaccagcttcaggcagccggcgagcaggtagccggggatacccatgtgcatcagccgcgtcagggtttcagccgtggagttggtatgcagcgtcgacagcaccaggtggccggtttgcgcggccttgaccgcgatctcggcggtttccgcatcgcggatctcgccgatcatgatgacgtccggatcctggcgcagcagggcacgcagcactcgggtgaagttcagctcggttttggcgttgatctgggtctgattgacgccgaacagcgggatctcgaccggatcctcgacgctgcacaggttgctttgcgcatcattcaactggcgcagcccgctgtacaacgttaccgtcttgccgctgccggtcgggccggtcaccaggatcaaaccttgcgggcaggccaacgctgccgcgtagcgcgccagatccgtccggctcatgcccagttgatccagcggtagctcttgctgctcgccctgctgaacgcgcagcaccaccttttcgccgtgcaacgtcggcagggtggcgatgcgcatggcatagcgcgcgctgtccagcgtcaggctgagctgcccgtcctgaggttgacggcgctcggcgatatccagttggccgaggatcttcagccgggcgatgaggcgcgcagccagctgcggcggcggtgaggcaagggtttgcagcacgccgtcgatgcgcaggcgaatgcgaaaatgctgccgaaagggctcaaagtgaatgtccgaggcgcggcgctgaatggccaggcgcagcgtctggttgatgaactgtaccaccggcgcatcgccgtcgtcggggtaggcgatgtcggtcgtgtcctcttcggccgtcaacggcgccgggagcggctcgtggtgctggttcagcgccatctccagcctggccgccggccattgttccaaatggatgcgcttgccggtggcgaaacgcagcgccgccagcagcccctgcggcgcttcttcgctgagcgcgaccgtcagggtggtcgggtcttcgctcagcgccagcgcctgatagcgccggcacagggcgtgaacctcttcgctgatttgcgcgttcatcgccattactccgccgcgttgtcgaagcggaagacttcctggcacacctcaaccagcgtcgcgttttcgctgctgcacagccgggtccagcgggtcagcccatcggcgttcgacttgggggttaatgccaccgccaggccctgtagcgtttggctgccggtcagcgtgatcacgcctttgacgactttcaccccgctgacatagcgcgacgtgccgccggtgggaatgcctttgctgccggactcgcagccggcgggcgcgccttcgtccagcacgcacagctcgaccgccattttatacggcgccatggtttgcagcatgtcggtcatcgccgctttctggatgtagcgctggtaggcgggaatgccgatggcgctgaggatggcgatgatggcgatcaccaccatcagttcgatcaggctaaagccgcgttgtgtttccatgcgttgtttcctccataacggtgtggaaaacaacggtagcggtttgcgcgggggaacggcgagcaggttttacgcgtttctcggcgtacttccatcagtattgatgtcgtttgcagcggagggaaaaacggtgcgaggggcttcgcaaactgcggtaacgcccccggcagcggccggggacgaggggatcatttgaagcgcatcgacagatcgagcgcggtcacatgcttggtcagcgcgccgaccgaaatgtaatccacgccggtttcggcgaaggtgcgcagcgtctcgcgggtgacattgccggacacttccagctgggcgcgaccctgggtttgggcgaccgcctgacgcatcatctctacgctgaagttgtccagcatgatgatatcggcgccggcatccagcgcctgctgcagttcatcgagcgactcgacttccacttccaccggcacgtcggcgtgcagccagaaggctttttccaccgcgttcttgatcgagccggaggcgataatgtggttttccttgatcaggaaggcatcggacagccccagccggtggttgctgccgcccccgcacagcacggcgtatttcagcgcggtgcgcaggccgggtaaggtcttgcgggtatcgagcaggcgagtccgggtgccttccagcagggccacatagcggctgacctcggtcgccacgccggaaagcgtctgcacgaagttcagcgcggtgcgctcgccggtcagcatcacccgcgccgggccgcgcagccggcagagcggttggttcggcgtcagacggtcgccgtccgccaccagccactccacctgcacctgattgcccaactgaataaagacttcgttcagccagcgacggccacagaacacgccggcttcgcgggtgatgacggtggcttcggcctgtttgtctgccggtaacaattgcgcggtaatatcgcgcccggcgtcgacttcgccccccaggtcttcgcgcagcgcctgggcgacggcatagggaatatcactttcaattcgttcaagaagctcggtgcggcgactgtcggcactgtagcggcgtgtcggcatggaaaactccgaaatggacggttagatcgtaggggaacatgctactctgttgcaggaataagtaccaccgcagagaggtgtctgatgcagttggaaaatggctggattgttggggtgacgcgagtgctctcgccgcactgcgatcggcgcccggatgacgagccgccctcgctgctggtcatccacaacatcagcttgccgcccggcgagttcggtggcccctatatcgaccagctgttcaccggcacgctcgaccctgcgcagcacccttatttcgccgagatccatcagctgcgggtgtcggcgcattgcctgattcgccgcggcggagagatggtgcagtatgtgcctttcgaccagcgtgcctggcacgcgggcgtttccctgtatcagggacgtgagcggtgcaacgatttctccatcggcatcgagctggaaggcactgaccagttaccctacaccgaagcgcaatatcgcacgctgcaggcggtcaccgtgctgctggccgaacgttatccgccgctggcggccaatatcgccgggcattgcgatatcgcccccggccgcaagaccgatcccgggccggcgttcgattgggatcgctatctggcatctctggaacaacgcggcgcgcccgccgacgctatgcttgagacaagaaaaagggagaggaatcgctaatgacgctgtttacgctgttgctggttttggcctgggagcgcctgttcaagctgggagaacactggcagctggatcatcgcctcgaagtggtatttcagcggctgcatcgggtttcgctggcacagacgctggcgatgaccgccgcctggatggtgatcgtctggggcgttctgtggttgtcgcacgggctgttcttcggcgtggtgacgctgctgctgtggatcgtcatcgatctgctgtgcgtcggcgccggcatcaagcgcaaacactaccgcgcctacctgaaagcggcgcggcagggggatatccacgccagcgatcagatggcggaagagctggcgttgatccacggcttgccggtggactgcagcgaagagctgcgcctgcgcgagctgcaaaacgcgctgctgtggattaacttccgttattacctggcgccgctgttctggtttgtggtctttgggccgtacgggccgatcgcgctggcggggtatgcctttctgcgcgcctatcaaacctggctggcgcgccacaatacgccgctggagcgttcgcaatcgggcatcgatcacctgctgaactggctggactggatcccggtgcgtttggctggagtggcctacgcgctgtttggccacggtgaacgcgcgttgccggcctggttcgcctcgctcggggatcggcattcgtcgtcgtatcaggtgctgacgcggttggcccagttctcgctggcgcgcgatccgcatatggatccggtgcaaacgccgcgggcggcggtgacgctggcgcgcaaggtgacgatgatcatcgtggtggtggtggcgctgttgaccatttacggcacgctgctttaagccgcagagaaaaaaaacgggcgccgaggcgcccgttttttttttggccattcggccgggattacagcttggcgaagcagcgacgcgcggcgtcgatggtgcgctggatgtcttccttgctgtgcgccacggacatgaagcccgcttcgaaggcggacggcgccagatacaccccttcttccagcatcaggtggaagaagcgcttgaagcgttccacgtcgcactgcatcacgtcctggtagcaggtgaccgccggcgcgtcggtgaagaacaggccgaacatgccgccgacgttgttgaccaccagcggaatattctcctcctgcgccgcatgcagtaggcctgcggccagcatctcggtcagttcggtcagcgtctggtgcacgccgacctgtgagacttcggtcaaacaagcgtagcccgccgccatggcgatcgggttgccggacagggtgccggcctggtagaccgggccggtcggcgccagcgcgtccattacttcgcgacggccgccgaaggcgcccaccggcatgccgccgccgatgattttgccgaggcaggtcagatccggctcaacgccgtaataggattgcgcgccggccagcgcgacgcggaagccggtcatcacttcgtcgatgatcaagagcgcgccgtacttgtcgcacagggcgcgcaggcccggcaggaattccggcagcggcggcacgcagttcatgttgccggcgaccggctcgacgatgatacaggcgatttcggacgggtactgttcgaaggcggcgcgcaccgaatccagatcgttataggtgcaggtcagagtgtgcttggcgaagtcggccggcacgcccggtgagttcggctggccgagggtcagcgcgccggagccggctttcaccagcaggcagtcggcgtggccgtgatagcagccttcgaacttgatgattttatcgcggttggtgtagccgcgcgccaggcggatggcgctcatggtggcttcggtgcccgagttcaccatgcgcaccatatccatcgtcggcaccagctcagtgaccagctgcgccattttgacttccatctcggtcggcgcgccgaagctcaggccgcgctgcgccgcttcgattaccgcgtcgcggatcgccgggtggttatgccccagcaccatcggcccccaggaaccgacatagtcgatataggccttgccgtcggcatcgaacaggtaagccccgtctgcccgctcgataaacagcggcacaccgcccacgccggtgaatgcacgcaccggagagtttaccccgccggggatcaactgttgcgcctgggcgtacagactttcggacttgctgtgtaggctcataaatcggctcctggattctcttttgaatgatttgaccgcgctattctagaggagagcgccgcgttatgaaacgatcacagtcagataccattaacggcagcgtccgccgccaggttggggtagaattatcgctctgcctatttgtattacaaattacctgacgaatcactcgcgatgacagaatcacaatcacagcccgtcgggacgttgagcccgcgtctgcgccgcagcgatgcggtgcgtcagtttattcgccgcgataaaaccccggttgcgatcctgatgatggccgcgctggtgggggcgctggccggtttgctcggcgtggccttcgataaagcggtggagtgggtgcagcagcagcggctggcttcgctggcgcaggtcgccgactcctggcttctggtgtggcccctggcgtttatcctgtccgccgcgctggcggcgctgggctattacctggtgcggcgctttgcgcctgaggcgggcggctcgggcattccggaaatcgaaggcgcgctggaagagctgcggccggtacgctggtggcgcgtgatcccggtgaaattcatcggcggcatgggcacgctgggggcgggcatggtgctggggcgtgaagggcccacggtgcagatgggcggcaacgtcgggcgcatggtattggacgtgctgcgcattcgcggcgccgaggcgcgtcatacgctgctggcgaccggggccgccgccgggttgtccgccgcgttcaacgcgccgctggccggcatcttgttcatcatcgaagagatgcggccgcagttccgctacaacctgatctcgattaaagcggtgtttatcggcgtgatcatgtcgagcgtggtgttccagctgtttaacggccagggggcggtgatcgcggtcgacaaactttcttcggcgcccatcaataccctgtggctctatctggtgttgggggcgatcttcggcgcggtgggcgtggggttcaacgcgctgatcttccgcacccaggacatgttcgcgcgcctgcacggcggcagaatgcgcaatgtcttgctgatgggcgggctgctcggcggcgtgtgcggcattctggggctgatccagccggaggcagcgggcggcggctttgggctgatcccgatcgccgcggcgggcaactacagcgtcggcatgttgatgtttatctttatcacccgcatcttcaccacgctgctgtgcttcggttccggcgcgccgggcggcatcttcgcgccgatgctggcgttgggcacgctgttcggcaccgccttcgggctggcgggggcgcatctgttcccgcagtacggcattgaggcgggcaccttcgccatcgccggcatgggggcgctgttcgccgccacggtgcgcgccccgctgaccggcatcgtgctggtgctggaaatgaccgacaactaccaacttattttaccgatgatcatcacctgcctcggcgccacggtggtggcgcagctgctcggcggcaagccgctgtattcgtcgatcctggcccgcacgctgcaaaagcaggaggcgcagctggcgcgggaggcggcgcagaaaacaagtaaggaaaatacaacaaatgcggtgaatacttgaacgcaacactcaggtatcggataatcgttaatattaatcaggcagccatagtcgcgatctgatgctgaacaatgttgggagtaaagagtatgagtgatcaaacggcactgcccctgcaatttaccgaggcagcagcaaacaaggttaagttcctgattgctgacgaagaaaacccgaacctgaagttgcgggtttatattaccggcggcggctgcagcggattccagtacggcttcacttttgacgacaaggtcaacgatggcgatatgaccatcgagaagcagggcgtggcgctggtggtcgatccgatgagcctgcagtacctggtcggcggttcggtggactacaccgaagggctggaaggatcgcgctttgtggtgaccaacccgaatgccaaaaccacctgcggttgcggttcgtcgttcagcatctgagtttgcctgccagaatatcaacccgctcgccttacggccggcgggtttttttatgcctatccttccacgaggatcactgccgtgccgttctcctgcgccggccggccggccgtgagtgatgtgcggcggctcagcgttcgagaataaaggcgggcagcttgagatgccaacgaatggccgccagccgaatggccagggtaatgagcatgcccagcatcatggcctgttgcagcggcatattgaaggtgtaaaacgccgtggcgtgcacgatgccgccgatgatgcaggcggtggcgtaaatttcggtgcgcaggatcatcgggatctcgcgcgccagcacgtcgcggataatgccgccgccgacgccggtgattacccccatgcagatcgccaccagcgggccggtgccggccgcgaaggccttgttgacgccgatgccgacgaacaccgccagcccgacggcgtcgagcaccggaagcacccacttcggcaggcggcgcggctggcgcaccagcagcagcgtcaagacgcaggtgatcatcgccaccaccagatcggtgggatccttgacccagaataccgggccgttggccagcgccatgtcgcggatggtgccgccgccgaccgcggtgaccacgcccaataccagcacgccgaacggatccatgcgcaacttgccggccagcagcacgccggagacggcgaacaccgccgtgccgagaatatccagccagaacaccagcatcagcggatctccgccagctggcggcacagctgctgcgccgccaacagtaggcgcggcccgccgcgattgaaccagtcttcgttcagcgcgatcaccggcacctgcagctgcggcgcccagaaggctttcacattggcggcctctttcgcgccgccggtgatgacgatggcctgcggctgacgcgccagtacctgctcgcggctgatctgtggccaaggggtgcggctgtcggcgaagacgttctgcccgccgcacagcgccagcacctggctttgcagcgtggcgccggagctggtgaacagcggctgggtgccgaactgcagcaacacgcggcgtggcacgttagtggcgtactgttgcctgagagcggcgaactggcggcgaaggccttctgcggcctgatgcgcctggtccgggtgcgggctgtagcgcgccagcttgtccagcaagccggcgatcccttcgagattgtcggcgtccgcatagaagatcgggatgccgaacgcggcgagctgatccaacgcgcgttgcggattgccgccgcgccaggcgaggatcagatccggcttgagcgccagcacccgctccagattgatgccctgccaggaggccacctgctccagcctggcggcctgcggcgggtaatcggaataggcgctcgccgccaccagcacatcgcccatgccggcggcataggcgagttcggtggcgttgggcgccaggctgatcacccgctgcgcggcgccggccggcagagccagccagagcgccaacaggcagaacatcgaggtgaagcgcagtctcacatcaaccgcgcttggccagggtttgcagcatggcgttgaccatcagcgtggactgcttggccgctaccaccaggaactcgtcaaagctcatgtgcgattcgctgtcggcgacgtcggaaatggcgcgcaccaccacgaacggcgtgccgaacagatggcagacgtgggcgatcgccgcggcttccatttccacggcggcgacgctcgggaaggtggcgcggatgcgcgccagcggttcggcgccgttgatgaaggcgtcaccgctgcagatcaggccgcgcaccgcgtgcagatccagctgtttgatgcagctttccgccagcgcgatcagcgcgtcgtcggcgacgaacgccgccgggcagccggccatctggcccggctcgtagccgaaggcggtgacgtcggcgtcgtggtagcgcacttcttccgacaccacgatatcgcccacgcgcagcgtgctggccaggccgccggcggagccggtattgatcaccacgtccgggctgcagtgctccagcaacagggtggtgcccatggccgcagagactttgccgatgccggatttcagcagggccacgtcaacgccgccgatctggccggtgtagatttcgcagcccgcgcgctggatggtttgacggttttcgatttgatcgcgcagcagggtgacttcctgctccattgcgccgatgatgcctactttcataaataacactcgctgattggccgtgagaattgcggcatagtctatcatggctgtgtaagagagataatgcgttgcatccgccgccgggaattgttatcacgggggcagggcgcaacggcggagaaacagatgtctgggatcgacttcaagcaaaaaatcagcttccaacggcctttcagcaaaccgatcgaggccgaggaagagtacgacatcgtgcggcagttcgagagcgatcgcgggcgcatcgtcaactcggccgccattcgccgtttgcagcaaaaaacccaggtgtttcctctggagcgcaacgcggcggtgcgcagccgcctgacgcactcgatggaggtgcagcaggtcgggcgccatattgccaaagagatcctcaaccgcttcaaacaggcggggaagatcgacgaactcggcctgacccggctgctcgatccgtttgagagcatcgtggaaatggcctgtctgatgcacgatatcggcaatccgccgttcggtcacttcggcgagtcggcgatcaatgactggtttgcccagcggctcgatcccaccagctgcggcagcgagccgggcagtcacgatcgctgccaggtcgcggcgctgcgcctgcatgaaggggagagcgatctgaaccggctgcgcagccggatccgtcaggatctcagccacttcgagggcaacgcccaggcgatccgcatggtgtatagcctgctgaaactcaatctgacctacgcgcaggtcggctgcattttgaaatacacccgcccggcttattgggcgggcgacatccccgccagccacagctatttgatgaaaaagcccggctactatctggcggaagaggccttcgtcgatcggctgcggcgtgagctgcatatgggcgagttcgatcgtttcccgctgacctacattatggaggccgccgatgatatctcttactgcgtggccgatctggaagacgcggtggagaagagcattttcaccgtcgagcagctgtatcagcacctgattcaggagtggggcgaggtggcgccgggcgatctgttcgacaagaccgtcgccagcgcgtttcgcaagatcgatcgcggtggcgcgcggcgcagcgcggaagatcagttcttcatgtatctgcgggtgtttaccgtggcgcggctggtgccgcacgcggcgcagcgctttatcgacaatctggacgcggtttatcagggcagctttaatcaggcgctgctggaggattccagcccggcctaccggctgctgaaaatatttaaaaatgtggcgttcaagcatgtgttcaaccacccggaggtcgaacagctcgagctgcaaggctaccgggtgatcagcggcctgctggacatttacagcccgctgttggcgatgtcgctggcggacttcagcctgctggtgcgtgaggacagccaccgcgcttacccgatcgaaacgcgcctgttccacaagctgtccaccaagcatcggctggcgtatgcggaggcggtagaagggctgcagcatttatcgccggagcagcaagccattcgggaatattatttccgcgcgcgtttattgcaggactatatcagcggaatgaccgacctttatgcctatgatgaatatcgtcgattaatggcggcggaataattaagctgaggaataattataagcaattccaaccggttggctgtcttgatttttgtaaagacggacaatatttgtttactattgccaatcatctgtgccggaacttcaggctattaattaactctgaataagcacgcaagacggccattcttttttgaacgactttataagagacacacagatgaaaaaaaccgcattagttctgagcgcattggcattcagcatcggcatggcgatgggcccggtgacggccagcgccgctgaaaccgcctcttccagcacccagcagttgccgagcctggcgccgatgctggaaaaggtaatgccttccgtggtgagcattaacgttgagggcagcaccacggtcaatacgccgcgcatgccgcagcagttccaacagttcttcggtgaagattcgccgttctgtcaggacggttcgccgttccagggctcgccgatgtgtcagggcggtgaacagcctgggccggatggccagccgcagggcacgcagcagaaattccaggcgctgggcgccggggtggtcatcgatgccgccaagggctatgtggtgaccaataaccacgtggtggataacgccaacaagatccaggtgcagctgagcgacggccgccgtttcgacgccaaggtgatcggcaaggatccgcgttccgacatcgccctgatccagctgaaagacttcaagaatctgacggcgatcaagatggcggattccgatcagttgcgcgtcggcgattacaccgtagcgatcggcaacccctacgggctgggcgaaaccgccacctcgggcatcgtttccgccctggggcgcagcggcctgaatatcgaaaactacgaaaactttatccagaccgatgcggcgatcaaccgcggcaactccggcggcgcgctggttaacctgaacggcgagctgatcggcatcaacaccgcgatcctggcgccggacggcggcaacatcggcatcggcttcgccattccgagcaacatggtgaaaaacctgacggcgcaaatggtcgagtatggccaagtgaaacgcggcgagctcggcatcatgggcaccgagcttaactctgagctggccaaggcgatgaaggtcgacgcgcagcgcggcgctttcgtcagccaggtggtgccgaagtcttccgccgcgaaggcgggcatcaaagccggtgacgtgatcgtcaccatgaacggcaaggccatctccagcttcgcctcgttccgggcggagatcggcacgctgccggtcggcagcaagatgtcgctgggcattatccgcgacggcaaaccggtgaccattgacgtcacgctggagcaaagcgcgcagacccaggtggcctcgggcaatatctacaccggcattgaaggcgccgagctgagcaatgcccaggtcggcaaccagaaaggcgtcaaggtcgacagcgtgaaagccggcagcgccgccgcgcgcatcggcctgaaaaagggcgacgtgatcctgggcgtgaaccaacagccgatccagaacctgggcgagttgcgtaaaatcctcgacagcaagccgtcggtgctggcgttgaatattcagcgcggcgatagccagctgtacctgctggcgcagtgataaacgtcaggcgctaaaagcaacaaaggcacgctatggcgtgcctttttgcattatggcctgaggattcaggccggttgcgccagatgcacgcgcgccgcgtggatcaccagttcaatctcatccaacagctccagccactccggctccagttcgtcgttggtgatgccctggcgcagctgccgctcgaggtagaaacacagctgcttgaggcgcggcacgccgctgtagctgcagctgccgtgcagcttatggaccaggtcgaggatctcgtcgtcgtgttgcccttcgagcagcgcctgcactcgttcgcgcacctgcggcaggaaatcgagcagcatttgcagcagatcgcgcgccagatccggcttattggccgcctgacgcagcgccagcggccagtcgagcgacagcggcgcgtcgtcggcgacggcgttttccatttcgccactgtgatagcgcgacagcacgcgggtcagcattttctcgtcgatcggcttggccaggtagtcgtccatcccggcctgcagcaggtgctcgcgctcgccgctggctgcatgggcggtgacggcgacgatcggcgtggagttgtggtgcggcaactggcggatcagttcgctggcgtgaatgccgtccatcttcggcatttgaatgtccatcaggatcagatccagcacgttgttgcgcgccagcgccagcgcttcctcaccgctctcgcacagcagcgttttttccacctgttcgcccagcagcgtgccgatcagcttcaggttggccgggttgtcgtcgaccgccatcaccgtcagcggcagacgtttacgctcaggcggggcggcgagccgatcgggcgtctccattctcagcagagggaacagacgcgtgctggtgatcggcttgatcaggcagccgagcgcgccttgttgtttaagcagctcggcatcgatctgcgcctggcacggcagcgccagaatgaccctatcggccagcttcagcgaggccagcaatttgtcctgatgctgcgccatgttgtcgcggaacgggatcggcacgccggccagcaggaagtcatagtggcttggcggcaactggcccagcgtcggcgagtgggtgatcaccagctgcgtgacgctgagcatgttgagcgtcgcctgcgccgccgtcgggttagactcgatataggccagcgttttgccgttcagatccggcagactcggcgccagcgacagcatgccctcgttcagatccagcgtgatatggaaccagaaggtcgagccgcggttcaactggctgtggaagcagatatcgccccccatctctttcaccagcttttgtgtgatcaccagccccagcccggtgccgccgtggcggcgggagatgctggcgtccgcctggcggaatgcctggaacagctgcgactgctggcgttcggagatgccgatgccggtatcgtggatctgcacttccacttccacccggcgatccagctgtttgcgcagctcgacgcgaatgtcgatattgccggtttcggtgaatttgatggcgttgcccagcaggttggtgatgatttgctgcaggcgcagcgagtcgccgatcacctgctccggcacgtcgttgtgcacatccagcgtcagctccaggcccttgtcgtgggcgctgggcgccagcagcaccaccacttcgtccagcgtttcacgcagggcgaacggaatatgctccagcaccagcttgccggcctccagcttggaaaagtccagcacgtcattgatgatggtcagcaggttgttggccgagcgctcgatggtctgcaaatagtcggtctgggttgcgctcagatcggttttcagcatctggcgggtgaagccgatcacgccgttgagcggagtacgcagctcatgcgacatgttggccagaaattcggacttgatgcgcgccgcctcctgcgcacgttttttcgccagatccagttcgacgttctggatctccatctgctccagcgtttcgcgcaggtctgacgtggcctgatcgatgttctgctgcatctcttcgtgataggcggtgagcgacatcgccatcgagttgatgccgtttttcagcatgtgcagctcgccgagcatgtagccttccacgcggctgtcgagctggccgcggcggatgcggtcgacggtgttcaccatattgcggatcgggccggtcacgtcgcgcatcagccggtaagcgaacaggatggcgatacacatgcacagcagcaacagcagggtagagacaaagacctctttatattgctgcagccgcaccgactgcagatccagctcgatcgccacatagcccaggttgttgtcgggatggctgccgccgtcggcggtttcatccggatactggctttccgacaggatcggcgtgcgcaggatcagcgaatcgccgcgtcgggtgagcatcagatcggtgggcaacggcacgcctttcggcagctgcagctgagcgaagttgtgatgataattggaggtgacgaacaaattgttctgcgcatcgaacacggtgatcgaacgcacgatgtccgaatggcggcggtgcaacaggctgaccaactgcctgaccgattcgcggctgcggaacgtcatgccgtactcgctggccaccgccagcggctcgatgatgctggcgccggcgtcgaccagttgttcctgcagctcgttatagcggtgcaccacgaagaaggtgctgagcagcaaaccaatcagcaaggtcggtgccagaatcaggatcatcatgcgcgcacgcaggctgtatttggtcatgggattccaatgtgggagaattgacagctgacactagcttaatgaaccagcacacaatcgacaaatatggcgcaattctactctcccaaacgccgcgtgacgacccggcagagctcacaaatcttcaccgtgacggtgagcgatctcgatcctttcggccagggcgtggcgcgccacgacggcaaagcggtgttcgtgccgggcgtcttgccgggcgagcaggcggaaatccagctgaccgaagacaagcgtcagttcgccaaaggcaagctcaaacgcctgctgagccgcagcccgcagcgggtagaaccgcgctgcccgcattttggcgtgtgcggcggctgccagcagcaacatgcggatgaggcgctgcaacagcagagcaaggcggcggcgctggtgcgcatgatcgcccgcgaaaccggagtaaccccgcaacaggaaccggtgatcgccggcccggaatacggctatcgccgccgcgcccgcctgagcctggcgtggcagccgaagcagcagcgcctgatgatgggctttcgccaggcggcctccagcgagctggtggcggtggagcactgcccggtgctgcggccggagctggagcagctgctggcgccggtgcgcgcctgcctgagcgggctgcaggcggtgcggcggctggggcatgtggagctggtgctggcggataacggcccgctgctggtgctgcgtcatctcgacgcgctgaaagaggcggatcggcaggcgctgttggcgtttggcgagcgggaaaaggtcgccgtttatctggcgccggacagcgaacgggtggaaaaactgtgcggtgaaacgccgtattatcaggttgacgggctacgcttagacttcagtccgcgcgactttattcaggtcaatgacgtcgtaaaccaacaaatggtggcgcaggcccttgaatggctcgacattcaacccaatgatcgggtgctggacctgttctgcggcatgggtaatttcaccctgccgctggcgcgccgcgccgccgcggtggtgggcatcgaaggtgttgccacgctggtagcgaatgggcaatataatgcacataagaataagctgaataatgcgtcgttcttccatgagaatctggaggacaacgttgcgcggcaaccttgggcagcacaagggtttgataaggtgatgctggatcccgcccgcgctggtgcggccggggtgatgtcacacattgtaaaactggcgccggcgcgggtggtgtatgtttcctgtaaccccaccacgctggctcgcgacagcaacgtgctgttgaacgccggttatcgtcttgcgcgcgtgcggatgttggatatgtttccgcacacggggcatcttgaatcaatggcgctgtttatcaacgagcgtgcgccagaggtcgctgcaaagtagggagaagttatggttgcggtaagaagtgcacatctgaatacggcgggtgagttcgctcttgatgagtggatcgccggcttggggctacctaacccgcagtcatgtgagcgattggccgcaacctggcgttattgtgagcagcagacccaaaaccatcctgacgcctcgctgctgctgtggcgcggcctggagatggtggaaattctctcgacgctgagcatggacaacgacagcatgcgcgccgcgctgctgttcccgctggtggacgccggcatcgtgcaggaagagaccctgaccgaagcgttcggcaagggcatcgtcgcgctggtgcacggcgtgcgtgacatggacgccattcgccaactgaaagccacccaaaacgactcgatggcctccgaacaggtcgacaacgtgcgccgcatgctgttggcgatggtggaggatttccgctgcgtggtcatcaagctggcggagcgcatcgcccacctgcgtgaggtgaaagacgcgccggaagacgaacgcgtgctggcggcgaaagagtgttccaacatctacgccccgctggccaaccggctcggcatcggccagctgaagtgggagctggaggatttctgcttccgctacctgcatccggaagaatataagcgcatcgccaagctgttgcatgagcgccgcatcgatcgcgaacagttcatcgacgatttcgtcgccgggctgcgcgccgagatggccaacgaaggcattcgggtggagatctacggccggccgaaacacatctacagcatctggcgcaagatgcagaaaaaacacctggcgttcgacgaactgttcgacgtgcgtgcggtgcgcatcgtggcggagcgcctgcaggattgctacgcggcgttgggcatcgtgcatacccacttccgccatttgccggatgagttcgacgactacgtcgctaacccgaaaccgaacggctaccagtcgatccacaccgtggtgctggggccgcgcggcaaaaccgtagagattcagatccgcacgcgccaaatgcacgaagacgctgaactgggcgtggccgcgcactggaagtacaaagagggcgcaggcgtgaccgtgcgctccggctacgaagaacgcatcgcctggctgcgcaagctgatcgcctggcaggaagaaatggcggactccggcgagatgctcgacgaagtgcgcagccaggtgttcgacgatcgggtctatgtatttaccccgaaaggcgacgtggtggatctgccggccggctccacgccgctcgatttcgcctaccacattcacagcgacgtcggtcaccgctgtatcggcgccaagatcggcggccgcatcgtgccgtttacctatcagctgaagatgggcgatcagattgagatcatcacccagaaacagccgaacccgagccgcgactggctgaacccaaacctggggtatgtcaccaccagccgcgggcgctcgaagatccacaactggttccgcaagcaggatcgcgacaagaacattctcgccggccgccagatgctggacaacgaactggaacacctcggcatcagcctgaaagaggccgaaaagctgctgatcccgcgctacaacatgaactcgctggacgaggtattggcggcgatcggcggcggggacattcgcctgaaccagatggtgaattacctgcagggcaagttcaacaagccgagcgccgaagaacaggatcgcgaggcgctgcgccagctggtgcagcagaaagcgccgccgccggcccgcaacaaggacaacggccgagtggtggtggagggcgtgggcaacctgatgcaccacattgcccgctgctgccagccgatcccgggcgacgacatcgtcggttttatcacccaggggcgcggcatctcgatccaccgtgcggactgcgatcagctggtcgatttgcaatcgcacgcgccggagcgcatcgtcgatgcggtatggggtgaaagctactccagcggttattcgctggtggtgcgcgtgatggccaacgatcgcagcgggttgctgcgcgacattaccaccattttggccaacgaaaaggtcaacgtgctgggggttgccagccgcagcgacaccaagaaacagttggccaccatcgacatggatatcgaaatctacaaccagcaggtgctgagccgggtgctggcgaagctgaaccagctgccggacgtgatagacgccaagcgtctgcacggcaactaagctcacatcgcctttcgggccgtatgcgctatcgatacggcccgaggtccatgcattcggtgggcgctcccatgcgcccccattctttctcagagattttttatgacccaatccactccgctgcagcgcctgctgaacatcatgaaaacgctgcgcgatccccaggtcggctgctcgtgggaccgcaagcaaactttcgccaccatcgcgccctacacgctggaagagacttacgaagtgctggacgccatcgagcggcaggactacgccgatctgcgcgacgaactgggcgatttgctgttccaggtggtgttctacgcccagatggggcaggaacaggggctgttcgatttcgatgaggtgtgcaccgccatcagcgataagctggagcgccgtcacccgcacattttcggtgacgccgaggggggggacagcgaagccgtggccgcgcgctgggagcagctcaaggccggcgagcgcgccgaaaaagcgctgcactcggtgctggacgacattccgcaggcgttgccggcgctgatgaaggcgcacaaaattcaaaaacgctgcgcctcggtcggcttcgactggaacaccctggggccggtgctggacaaagtgtacgaagagatcgatgaagtgatgcacgaagcccgccaggcggtggtcgatgagagcaagctggaagaggagatcggcgatctgctgttcgccacggtgaacctgtcgcgccatctggggcacaaggcggagaacgcgctgcaggcggcgaaccgcaagttcgagcgccgcttccgccaggtggaagcgatcgtccagcaacgcgggctgcggcttgaagacgccacgctggagcagatggaagacgcctggcagcaggtgaagaaatctgaaatctgatgcgcttccggcgttcatggcgccggggtgaacatgaaggacgttccacgcagacaagggaaggtggcgtcatgatcaagaggctaatgcttttagcctgttttttccccggtttcagcacggcgtctcctcctgctgatgttgggcggctgcggtatgatgaacgcaggctgccattagtcgatgtgcagatcgataaccggttacacacgttcatgctggataccggcagcgcagaagggatacacctttatcagcacgatctggagcgtctggtcgcgcaaccgagtctgaaggcggtgcagctggcgcctcggcggctgagagatctctctggcggtgaaaatcaggtgtctgcctggcggattagtcggctgtttattggcaatatcccgtttaacgacgtcgaagcggtgagttttaagccctggggactcagcctgggaaacgaggtgccggtaagtgaagtgatggggcttgggttgttccgcgatcgaaaggtgctgatggacttcgaaaacgaccgcttgcaaatgttgactcatctgccttcagacattgcaatatgggcttcatatccattcgaacagactgatgaggggctgagtgtgacggccttcgttggcaataaaccgttgcgcctgattgttgataccggcgccagccattctcttttgtttgccgcaggcttgccggctggcctcttgttttccggctgtcgctccattgagcctgaggccgataacctggattgccgagtgaccagattcaccttgaccgatcgccggggccggcatcacaacgatttggccatcgttaccgaaggcccaacgtctgaggcgctgggttttgatggtctgctggggatgggttttatgcggggtcatcgtgtgattgttgatatgcctgaacgcatgctctacatcagtcgttaacctgatgcgcctcgatcccaggtaatcgggtttagggaagctgaaccgccgctacaatgttgatcgacgacaaggttcacgaaagctgaaacggttaagcttgcagtcaggtcacaggcgcatggctgccgtcggcagcaaaaggccaacaaactgaaatctaaggcgttttatcgctcccgaggggcggtaaaaagaaattttctccgctaactctttgtatttcctggagggtttgcggggcgccggcggagtaaaccctgatgaacacgggagggcggccgagatgatggacagcaaaacgatcgtttgtaggtcaggagaggttcgggtatactactttcccgtcctggttcttccatcgtctttaaacctaaactctcaggttcagcatgacaactaattatatttttgtgaccggcggggtcgtatcctctctgggtaaaggcattgccgcagcctctctggcggctattcttgaagcccgtggcctcaacgttaccatcatgaaactggacccgtacatcaacgtggatccgggcaccatgagcccgattcagcatggggaagttttcgtcaccgaagacggcgcagaaaccgatctggatttgggtcactacgagcgcttcatccgcaccaaaatgtcgcgtcgcaacaacttcaccaccggccgcatctactccgacgtgctgcgtaaagaacgccgcggcgactatctgggcgcgaccgtgcaggtcattccgcacatcaccaacgcgatcaaagagcgcatcatcgaaggcggcgaaggccacgatgtggtgctggtggaaatcggcggcaccgtcggcgatatcgaatcgctgccgttcctcgaagccatccgtcagatggcggtggaagtgggccgcgagcacaccctgtacatgcacctgacgctggtgccgtacatggcggcggcgggcgaagtgaaaaccaagccgacccagcattccgtaaaagagctgctttccatcggtattcagcctgatgtgctgatttgccgttccgatcgcgcggttcctgctaacgaacgcgctaaaatcgcgcttttctgcaacgtgccggaaaaagcggttatctctctgaaagacgttgattctatttataaaatcccaggcctattgaaatctcagggactggacgattatatttgtaaacgattcagcctgaacgcgccggaagccaacctggccgaatgggaacaggtgatctacgaagaagccaatccgggcggcgaagtgaccatcggtatggtcggtaaatacgttgagctgccggacgcctacaagtcggtgattgaagcgctgaagcacggcgggctgaaaaaccgtctgaccgtgaacatcaagctgatcgactcgcaggacgtggaaacccgcggcgtggaagtgctgaaagggctggacgcgatcctgatcccgggcggctttggctatcgcggcgtggaaggcaaagtgatgaccgcacgctatgcgcgcgagaacaacattccttatctgggcatttgcctgggcatgcaggtggcgttgatggagttcgctcgcaacgtggcggggatggagaacgccaactccaccgagtttatgccagactgtaagtacccggtggtggcgttgatcaccgaatggcgcgacgaagacggcaacgtcgaagtgcgcagcgaagaaagcgatttgggcggcacgatgcgcgtaggtggccaacagtgcaacctgagcgacaacagcctggtgcgccagctgtacggcgaaccgaccattgtcgagcgtcatcgtcaccgttacgaagttaacaacatgctgttgaagcagatcgaagccgcagggctgcgtgtcgccggtcgttccgccgacaacaagctggttgagatcattgaactgccgaatcacccgtggtttgtagcctgtcagttccacccggaatttacgtctacgccgcgtgatgggcatccgctgttcgccggcttcgtgaaagccgctggcgagcatcagaagcgccaggtgaaataacatatttggtaggcggcgcgcggtgagaaccgcgcgctgtttgtctggagttttagtttaacttgtactgaggaaaacctaatgtccaaaatcgttaaagtcatcggtcgtgaaatcatcgactcccgcggtaacccgactgttgaagccgaagttcatctggaaggcggtttcgtcggcctggctgctgcgccgtcaggtgcttctaccggttcccgcgaagcgctggaactgcgtgacggtgacaagtctcgtttcctgggtaaaggcgtactgaaagccgttgctgcagtaaacggtccgattgctcaggcagtactgggtaaagatgccaaagaccaggcgaacatcgacaagatcatgatcgagctggacggcaccgaaaacaaatccaacttcggcgccaacgccattctggcggtttccctggcagcagcgaaagcggccgcagcctctaaaggcatgccgctgtacgagcacatcgctgaactgaacggcaccccaggcaaattctccatgccactgccgatgatgaacatcatcaacggcggcgagcacgctgacaacaacgtcgacattcaggaattcatgattcagccggttggcgcgaagaccctgaaagaagcggtgcgcatcggttctgaagtgttccaccacctggcgaaagttctgaaagccaaaggcatgaacaccgccgtgggcgacgaaggcggctatgcgccaaacctgggttccaacgccgaagcgctggcggttatcgctgaagcggtaaaagcggcgggctacgagctgggcaaagacgtcactctggcgatggactgcgcggcttccgaattctacaaagacggtaaatacgtgctggccggcgaaggtaacaaagccttcacttccgaagagttcactcacttcctggaagagctgaccaaacagtacccaatcgtgtctatcgaagacggcctggatgaatccgactgggcgggcttcgcttaccagaccaaagtactgggcgacaaaatccagctggttggcgacgatctgttcgtgaccaacaccaagatcctgaaagaaggcatcgagaaaggcatcgctaactccatcctgatcaagttcaaccagatcggttctctgaccgaaaccctggcagctatcaagatggcgaaagacgccggttacactgcggtgatctctcaccgttccggtgaaaccgaagacgcgaccatcgctgacctggcggtagggactgcggctggtcagatcaaaaccggttccatgagccgttctgaccgcgttgccaagtacaaccaactgatccgtatcgaagaagcgctgggtgaccgtgcgccgttcaacggcctgaaagaagttaaaggccagtaagttcgaccgattcggttgctaaataaaaacccgccgcggcgggtttttttatgttttaaattcgtgatgattgtcattttaataataagttttttattgaaagcgtggttttgtttaacccgataatttcattaaagatagtaaacgcgcttattttatattccaattttgtttgctttataactattcgttactagactgccaataaggcagtttatttctcgccgttctgccgtagaccttgaacatcaccataccttaatactgccggcttgctggccggttgagcgagggcttgatgcgacagcgaatcatcattgtcggcggcggaaccggcggcaccatattggccaatttattggccacaaaattgcaccgggaaattattaataataaagttgagttattaatgatatcggattcaccgctgcattattacaaaccggcgtttatgtatgtggcattcaatacttttttcaagcaggagctcacgcgttcacagcggagtttattgcggcctgaaatacagtttattattgataaagcggaatctttcgatttaaaacagcgaagtatagcgacgcaaagcggtaagctttactcctatgactttctggttttcgccaccggctgcgtaccttggccagagcgcatcgaagggttggcgcaggcgggcgatcatttctaccagtatcaggccgcgcggcagttggcgcataagctggcgacgatcgagaaaggccgcattttcatcaccgtgtccttccctgaaacgcccaacgtgccccatcagtgcggcatcgcgccgatcgaaaccaccctgatgctggacgactacctgcggcggcgcggcgtgcgcaaggcggtggagatcgtttatacctacccaaccatttctcaactgctgcgtaactgcctgtttttacagcgcccgaccggcgaagcgctgcccgccatttttgccgcacgtgacattctccaccagcgtgggtttaccctcagccgggtagacgcccaacgtaacatcgcctattccgctgagggggaagagcagccgttcgacattctgatggcaacgccgccgattcgtgcagtcgaggcggtgcgcaataccgggttgagcgagagtcaaaacggtgaaggctggctgccgaccgatcatcaaacgctgcaggtctacggccaacagggcgtgtatgtcataggcgataccgtggatttgccggtcagcaaggccggcggctcttgccataatcaggcgccggtcattgccgacaacatcgtggcggaaatgcggctgggccaaaccgtgagccattatgacggcaaggtgcaggcggtcgcgcaaatggggctgaatgccggcatgccgctggtgtacgactaccgtcacgacgtgctgccgacgcccgccaccaaggtgggcggcatgctgcgcaatgggtttaaccgcggcctttactgggccacggtaagggggctgatatgacggaaagcacggtgcatgcggctgacctgcaatcattggcggcgttgctcgagaaactgcagccgctgctggcgggtggccggttggataacgtggtcgatctgttgtcgctgttgtcggacgtggtggatattgccgacaacgcgctggtggagaaattagccggcgtctttgaaggtttggtgaccctcggctgggaaggcggaacggcgctgcagatggcgcacagcgagctgcagttgaatccaccaccggccagttttcgcgcgctgtacgccttgctgaagcagccggataccctgctggggttaacgttgctgctgcgtactttacaaatcatcggccggcgcacgcgagacagcgcgttgccgtcagccctgccagatgaatcgtcgaattaagcttcactcactcaggtaaggagttgtgttatgtccgctacagcagttggccacgactttgccacccgggctattcattacggctacgatcctcagcggtatcagggggcactgtctccgccggtgtttatgagctctacgtttgcttttcccacggcggaatacggcggcgcctgctttgccggcaccgagccggggtacttttactcgcgcatcgccaacccgacgttaaacctgctcgagcaacgcatcgccaacctggaggagggggaggcggcggtggcgttcgcttccggcatgggggcgatcaccgcgtgttgttggacgctgctcagaccgggtgatgagctgattgtcgacgaaaccgtctatggttgcaccttcagctactttcatcatggtctggcgcgctttggcgtcaagataacccacgttgatttgacccggccggagcggttggcggcggccattggaccgcgtacccgcctggtgtattgcgaaacgccggccaatcccaatatgcgtttgatcgatatcgccgccgtggcggagatcgcccatcggcatcaggcgctgttgctggtggacaacacctactgtacgccctatctgcagcggcctttggcgctaggcgccgatatcgtggtgcactcggcgaccaagtacctcggcgggcatggggatctcctggccgggatcgcggtgacgcgtcaggcgttggccgaggcgatccgtctggaggggctaaaggacatgaccggggcggtgctgtcggcgcaggatgccgcgctggtgctgcgcgggatgaaaaccctgccgctgcgcatggagcgtcattgcgataacgcgcagcgcctggcggagatgttggcggagcatccggcggtcgagcgggtatattaccccggcctggcgaacttcccgcagcatgcgttggcgcagcggcaaatggcgcgccccggcggcatgctggcgtttgagctgcggggcggcctgcgtgcaggcattcgcttcctcaacgcgctgcagctcatcttgcgcgcggtcagcctgggcgattgcgaaagcctggcgcagcacccggccagcatgacgcactcggcctacacgccggaagagcggaaacggcaccacatcagcgaggggctggtgaggttgtccgccgggctggaggcgtttgacgatctgcaggtggatatcctgcaggcattggcgcaggcgcaataaaaaacccgccgcagcgggttttagccgaagcgagcgttacatctgttgcgtcgctgtggtcaccggcgaaccgccgccttttttgcgtacccacagccagtaagccgcggtgaggaacgcgatccacaccagcccgacgtacagggcgatgcggctctcttcgaagtagccgagcaggccgatgacgaacgccataaaggcggtcgccaatgccggcgccaccggccaccacggcaccgggaagctcaactgacgcgtttcttccggcgacagcgtgcggcgcatgacgatctgcgacagcaggatcatcagccacacccagacggtggcgaaggtggcgattgaggcgatgatcatgaagaccttctccgggatcaggtagttgagcaccaccgccagtagcagggcgaccgacatcaccagcactgtcatccacggtacgccgctggcggtcagcttggtgaagctgcgcggcgcctggccgtcctgcgccatgccgtacatcatgcggccggcgccgaagatgtcgctgttgatggccgaaatggccgcggtgatcaccaccacgttcagcacgttggcggcggagctgatgccgaggttgctgaagatctcaacgaacgggctgccgttctggccgatgctgttccacggatagatcgccatcagcaccgtcagcgtcagcacgtaaaacagcaggatgcgcaccggtacggcgttgatcgccttcggcagcactttggcggggtctttcgcctcgctggcggtgatgccgatgatctcgatgccgccgaaggcgaacatcactaccgctaatgacgcgaccacgccgccgatgccgttaggcataaagccgccgtgctgccacaggttgctgatgccggtggcgtgctgggcttgcccgaaaccgaacagcattaccgccgcaccgccgacgatcatcgccacgatggcggcgaccttgaccagcgacagccagaactccagctcgccgaaaaccttgacgctgcacaggttgagcgcgccgataaacaggatgatgctgagcacccagacccactgggcgacgtccgggaaccacagccccatatagatgccgaaggcagtgacgtccgccagggcgacgatcaccatttcaaaggtgtaggtccagccggtgaggaacccggccagcgggccgagatagtggctggcgtagtggccgaacgaaccggaaactggctggtgcaccgccatttcgcccagcgcgcgcatcaccatgaataccgccgcgccgcccaccaggtaggccagcagcaccgccgggccggccagctggatggcgccggcggagccgtagaacaggccggtgccgatcgccgagccgagagccatgaaacggatatgtcgcgcgtttagtccgcgtctgagttgtgttgtttcgttacgcatgttgcttcccgttaagtgtttgccgaacaggcacgcgctgcccgcgccgggtggaacgcacccggcggggcagaacaaactgcgtgattcagtatgtgatgattatgcctggctaggcagcagcgccgcaggcagcagcgatgtcaggtgaccggccgccaagagttggctggcggcttcaatgtcgggggcgaagaaacgatccttgtcgtagaaactgacatgctcgcgcagcagacggcgcgcctgctccagaccttccgaggtcttcaggccgttgcggaaatccaggccctggcaggcggccagccactcgaccgccagaataccgcgtacgttgtccgccatgttccacaggcggcggccggcggccggcgccatggaaacgtggtcctcctggttggcggaggtcggaatgctgtcgacgcttgatggatgcgccagcgctttgttttcgctggccagcgctgcggcggtgacctgagcgatcatgaagccggagttcacgccgccgttctccaccaggaacggtggcagctgcgacatgtgtttgtccatcatcagcgagatgcggcgctcggacagcgaaccgatttcggcgaatgccagcgccaggttatcggcggccatcgccaccggttcggcgtggaagttgccgccggacagcacgtcgccctgttcggcgaacaccaacgggttatcggagacggcgttggcttcgatctccagcacctcggcggcctgacggatctgcgtcaggcaggcgcccatgacctgcggctggcagcgcagggagtaaggatcctgcactttttcacagttgcggtgcgagtcggagacttcgctgcgcgcgccgagcaggtggcggtaggcgagggcggcgtcgatctggccgcgctggccgcgcacctcgtggatacgcgcatcgaacgggctgcgagagcccagcgccgcttccaccgtcaggctgcccgccacggtggcggccgcgaacagatcttcggcatcgaacaggccgcgcagcgcgaaggcggcggagacctgggtgccgttcagcaatgccaggccctctttcgccgccagcgtcagcggtttcaggccggctttggccagcgcttcggtcgccggcaaccattgaccctgatggcgtgccttaccttcgcccagcagcaccaggctcatgtgtgccagcggcgccaggtcgccggaggcgccgacggagcctttaagcggaatatgcggatagacttcggcgttgaccagcgcgatcagcgcctggataacttccaggcgaatgccggagaagccgcgcgacaggctgttgattttcagcaccatgatcaggcgcaccagattgtcgtcggtcggctcgcccacgccggcggcgtgtgacagcacgatcgagcgctgcagattttccaaatcgtcgcgggcgatgcgcgtcgaagccagcaggccaaatccggtgttgatgccgtatgtggtgcggttttcttcaacgatgcgctctacgcaggccacgctctgctggatagggccgtaggcgttgtcgtccagcgtcagcgtcaccggatgttgatagacgtcgcgtagctgggccagcgtcagtttgcccgggcgaatagtcagcgctttcatgctttttctccttgggtggcggcaaccatcggcaggttcaggccttgctcgcgggcgcagtcgatagcgatatcgtagccggcgtcggcgtgacgcatgaccccggtagccgggtcattgtgcagcacgcgggcgatgcgctcggcggcctcatcggtgccgtcgcagacgatcaccatgccggagtgttgggagaagcccatgccgacgccgccgccgtggtgcagggaaacccaggtggcgccgctggcggtgttcagcagggcgttcagcagcggccagtcggagaccgcatctgagccgtctttcatcgcttcagtttcacggttcgggctggaaacggagccggaatccaggtggtcgcggccgatgacgatcggggcggacagttcgccgcggcgcaccatctcgttgaacgccaggcccagcttggcgcgctggccgaggccaacccagcagatgcgcgccggcaggccctggaagctgatgcgctcgcgcgccatgtccagccagcggtgcaggtgctcgtcatccgggatcagctctttcaccatggcgtcggttttgtagatgtcctgcggatcgccggacagcgccgcccagcggaacggcccgatgccgcggcagaacagcggacggatgtaggccggcacgaagcctgggaagtcgaaggcgttgtcgacgccggtttctttcgccatctggcgaatgttgttgccgtagtcgaaggtcggcacgcccatctgctggaacgccagcatggctttgacgtgatcggccatcgattgcttggcggcggcgaccactttggccggctcggtttgcgcgcgctggcgatactcttcccagctccagcccttcggcaggtagccgttcagcggatcgtgggcgctggtctggtcggtgaccatgtccgggcgcacgccgcggcgcaccagctcaggcaggatttccgccgcgttgccgcacagagcgatggagatggctttgccttctgcggtgtattttttgatgcgggccagcgcgtcgtccagatctttggcctgctcatcgacgtagcgggttttcagacggaaatcgatgcggctctgctgacattcgatgttcagcgagcaggcgcccgccagcgtcgcagccagcggttgcgcgccgcccatgccgcccagaccggcggtcagcacccaacgcccctgcagactgccgtcgtagtgctggcggcccgcttcgacgaaggtctcataggtgccctgaacgatgccctggctgccgatgtagatccagctgccggcggtcatctggccgtacatcgccaggcctttggcgtccagctcgttgaagtgttcccaggtcgcccagtgcggcaccaggttggagttggcgatcagcacgcgcggcgcgttgctgtgggttttgaatacgccgaccggcttgccggactgcaccagcagggtttcgtcttcttccagcgttttcagggtttcgacgatcttgtcgtaacaatcccagtcgcgcgcggcgcggccgatgccgccgtacaccaccagctcgtgtgggttctccgcaacttcaggatcgaggttgttcatcagcatgcgtaacggcgcttcggtcagccagctttttgcgtttaattgtgtgccgcgtggcgcgcgtacatcgacattgcgaactttgttatttgtagtcacagcattttcctcaaacagtatcggtgcagattccatgccgcggtggggatgagtaccacggcataacaatgcgtagggcttattaacatatacttgtatgtacaagcatatgcaacactgaccagttgccgctgaaaagtggcataagaaaaagttattttctttttatatcaggttgatatgcgattttttatcgccggtctcagatacggaaagccggagaaaagtgagctgttcggcaaaaatgaattaaaattgactcatttttgggcggctagtcacaatatttttacagactgattacagttggcggcggaggataaacaagccctatcaccgcaggaagaaagcccgccgtgggcgggcttgccaggctcaggcagccggttgcagcatcggcttgcggctcatcttgcacaccgtggcgatggcggcgatcagagccggtacgcacaggaacatcaggatgctctgcacttcccactgcatcgccagcagttgggcgcccatcatggtgccggcgacgccgccgaagcggccgatgccctgcatccaggcgatgccggtggcgcggctgtgggtcgggtagaaggtggccgccagcgtttgcagcccggactgcgcgccgttcatggtgacgcccatcaggaagatgaaggcgcccagcagcacgatctgcttgtcttcggtggccatcgccacgatcagcagggcggtgacgacaaagccgctcgagaccactttgtgcgcattccagcggtccatcagccagccggccaccaggatgccgagcgtgccgccgaaggtgaacagcgaggtgagcatcgccgattgctccagctgatagcccaagccctgcatcaggatcggcatccagctcagcaacacgtagtagatcaccagccccatgaagtaggtcacccacagcatcagcgtgccgagcaggtaagggcgactgaacagcagcccgacgctggtcttggcctgcgtcagcttctcttcatacaggtaaaaacgcgtcacgccgtcgaggctctggctgacgaagcgttgcgcaatgcgtttgatcttcgccgcatcctgcccgcggttgaccatatatttgaccgattccggcagcagcaggatcagcaacaccgtcaacgccagcggcgcaatggcgccgagcaacagcacgctgtgccagccgtagctcgggatcagccacgatgaaatggcgccgccgccggccgcgcccagcggaaagccgcaatacatggtattaatcgccagcgaacggcagcgctgcggcgcgtattcggagatcagcgtgatagcgttgggcatcgccgctcccagcccgaggccggtgaggaaacgccacagcgtcaggctattgagcgagccggcgtaggcggtggccaggctcgacaggccgaagaacaggcaggaaaacaccagcacgcgcttgcggccgatgcggtcggagattggcccggctatcagcgcgccgagcgacagccccaacagcgcggcgctcagcaccggccccagatcctgcttcacgatgccccagtctttggcgaccgagggggcgatatagcccatggcggcggtatcgaaaccgtcgatggcgaggatcaggaatccgagaatgatcagtgtccagtgaaacagcgaaaacttgctgtcgtcgatggcctgttgaatgtttaactcgctggtggaatgagtcatggcaccctctaaacgcagatgtagtcgtgatgaatagtacgtggccgaaactgatgctcggcttgtgtttgcttgtatatacatctgcgcgtcggcgctttatgtcaaatataattatcttatttgttaacttcgtgttgttttctgtggagcaggttgcaccgtggatgaaaggcctaagaccggttaacaaattaaatgaacgccattggcggtgagatatgctggcggcggcgcggaggaaaaaatttaatacaattttggccgtttggtcgccgagccggaatctgcgataatcgttttttacttttccagattgagaaaccgatgcagtacccgatcaacgagatgttccaaaccttgcagggcgaaggctttttcaccggcgtgccggccatttttatccgcctgcagggctgcccggtagggtgcagctggtgcgacaccaaacatacctgggaaaaggaagcccatcgggaagtcgacctgcaacggatcctggtcaaaacagaagagagcgacgcctggggcaatgccagcgccgagcagctgctggcggtgatgcgtcagcaaggctacaccgcgcgtcatgtggtgatcaccggcggcgaaccctgcatctacgatctggcgccgctgaccgagctgttcgaacagcacggctaccgttgccagattgaaaccagcggcacccacgaaattcgctgttccgccaacacctgggtgacggtttcgcccaaggtgaatatgcgcggcggcatgaaggtgttggatcaggcgctgcggcgcgccgacgaggtgaagcatccggtggcgcgcgagcgcgacatcgaggcgctggatgcgctgctggcgacgttgcaggatgacaaggcgcgcattatcgcactgcagccgatcagccagaaagaagaggcgacccgtctgtgtattgaaacctgtatcgcgcgcaattggcggctgtcgatgcagacccacaagtatctgaacatcgcctaaaatcagggcgccattgcggcgccctttcttttaacctttatatacgcatcccgccgtacaggtctctttcaccatcaccgccgtcaattccggcagctggggcttgagctgctgccaaatccaggcggcgagcacttcgctggtgggattttccaatcctggaatatcgttcagataatggtgatccagccgttcccagatcggggaaaacacagccttgagctcggcgaaatccatcacccaaccggtgtggggatccacttcaccggtcacttccagacgcaccataaacgaatgcccatgcagacggccgcatttatggccctccggcacgtgcggcaagcggtgtgcggcttcaaactgaaaatctttaaacagcgtggttgccattattacggcctcattgactcaaaaaccgccgcatagtaccggaaagcgcgtctgcttgccatttataccgttatggtctaccgccgcgctaaccgcgcctggttaacactttttttgtttggtgtttgcggtacctatcggctggggttatgagccgaaatgttgaacggtgaaaaaacgatgaaaaaaagcgctttaatttcatctggataaaaaactttgtttaacggtttaagcgttatgccttaccagaaaaacagcttagtcattttggttatgatttattgctatcccttatttaatcgttgctattctgctcggtaaccttacaaactctcctgatcttttccgcacacccgacgcagcgaagagacagcgactgacactggcgcgcgcctggcaggaaaggcgctaagtataggaaataagtacagcaatgacgactcaggctcctccaacatctttgctcccgctgacgcccgaacagctggcgcgcctacaggcgacgatcggcgactattcgccgacgcagctggcgtggctgtccggttatttttggggcatggtcaatcaacagcccggagccgtggccattgcgcctgttgcccctgcggctgccgccggcatcaccatcatttccgcttcgcagaccggcaatgcgcgccgcctggcggagcagctgcgcgacgatctgctggccgccaatctgagcgccacgctgatcagtgccggcgactacaagttcaagcagatagctcaagagcgcctgctggtgatcgtcgcctccacgcaaggggaaggtgagccggcggaagaagcggtggcgctgcataaattcctgttctcgaaaaaggcgccgaagctgaatgataccgcttttgcggtgttcgggctgggcgacacctcttatgagaatttctgccagtctggtaaggatttcgacggcaagctggccgagctgggcgccgagcgcctggtggagcgcgtggacgccgacgtggagtaccaggaactggccgccgcctggcgcaaacaggtggtgtcggtgctgaaggcgcgcgcgccggcggaaagcgccgcgccgggcgtgttggccagcggcgcggtcgatctgatcgacagcagcccgtacagcaaggaacagccgctcaccgcccaactggcggtcaagcagaaaattaccggccgcgcgtcggataaagacgtgcgccatatcgagatcgatctgggcgactccggcctgcgctatcagccgggcgatgcgctcggcgtatggttcgacaacgatccggcgctggtggacgaactggtgcagctgttgtggctgaaaggcgacgagccggtcgaggtggaagggcaaaccctgccgctggcgcaggcgctgcgcagccatttcgagctgacgcagaacaccacgccgatcgtcgataaatacgccgcgctgtcgcgcgacgaaacgctgatcggcctgctggcggataaagccgcgctacagcagtacgcgcacaacacgccgatcgtcgacatggtgcgccaggcgccggcggatctgagcgccgaacagctggtcggcctgctgcgcccgctgacgccgcgcctgtattccatcgcctcttcgcaggcggagaacgaaagcgaagtacacatcaccgtgggcgtggtgcgttacgacatcgacgggcgcgcccgcagcggcggcgcctccggcttcctggcggatcgtctggaggaagacggcgacgtgcgggtgtttatcgaacacaacgataacttccgtctgccggccaacccggaaacgccggttatcatgatcggcccgggcaccggcatcgcgccgttccgcgcctttatgcagcagcgcgacgccgacggcgccggcggcaaaaactggctgttcttcggcaacccgcactttaccgaagatttcctgtatcaggtcgaatggcagcgctacgtgaaagacggcctgctcacccgcatcgatctggcctggtcccgcgaccaacaacataaaatatacgtacaagacaaactgcgcgaacagggcgcggaagtgtggcgctggattcaggaaggcgcgcacatttacgtctgcggcgatgccaatcgcatggcaaaagacgtggaaaacacattactggaactggtggccgagcacggtggcatggataccgagcaggcggatgaatttttaagtgagctgcgccttgagcgccgttatcagcgagatgtttactgatgagtgataaacaccccgggcctttggtagtcgaaggcaaactggccgatgcggagcgcatgaagaaggagagcaacttcctgcgcggcaccatcgccgaagatttgaacgacggcctgaccggcggcttcaacggcgacaacttcctgctgatccgttttcacggcatgtaccagcaggatgaccgcgacattcgcgccgaacgcgccgagcagaagctggagccgcgccacgccatgatgctgcgctgtcgcctgccgggcggcatcatcagcccgcagcagtggctgggcatcgacaagttcgcccaggagagcacgctgtacggcagcattcgcatcaccaaccgccaaacgttccagtttcacggcattctgaaaggcaacgtcaaaccggtgcaccagctgctgaaccgcctggggctggacgcgctggcgaccgccaacgacgtgaaccgcaacgtgctgtgcacctccaatccggtggagtccgagctgcatcaggaagcctacgagtgggcgaagaagatctccgaacacctgctgccgcgcacccgcgcctacgcagaggtgtggctggatcaggagaaggtggccaccaccgacgaagagccgattctggggccgacctacctgccgcgtaaatttaaaaccacggtggtgatcccgccgcagaacgacgtcgatctgcacgccaacgacatgaactttgtggcgatcgccgaaaacggcaagctggtgggcttcaacctgctggtgggcggcgggctgtccattgagcacggcaacaagaaaacctacgcgcgccaggccagcgagttcggctacattccgctcgagcatacgctggcggtggcggaagcggtggtgaccacgcagcgcgactggggcaaccgtaccgatcgcaagaacgccaaaaccaaatacacgctggagcgcgttggggtggacgttttccgcgccgaagtggaaaagcgcgccggcatcaccttcgcgccgatccggccgtatgaattcaccggccgcggcgatcgcatcggttgggtgaagggcatcgacgatcagtggcatctaacgctgtttatcgagaacggccgcctgctggactatccggggcgcccgctgaagactggcatggcggagatcgccaagatccataaaggcgacttccgtctgacggcgaaccaaaacgtgatcatcgccggcgtgccggaaagcgagaagacgaagatcgaagccctggcgcgcgatcatggcctgatcgacgaccagatcagcgagcaacgcaaaaactcgatggcctgcgtgtcgttcccgacctgcccgctggcgatggcggaggccgagcgtttcctgccgcagtttgtcaccaaggtggaagggatcatgcatcggcacggggtgggcgacgagcatatcgtgctgcgcatcaccggctgcccgaacggctgcggccgcgcgctgctggcggagctggggctggtgggcaaggcggtcggccgctataacctgcatttgggcggcaaccgcgaaggcacgcgcattccgcgcatgtaccgcgagaacatcaacgaagatgagatcctgagcgagatcgacctgctggtggggcgctgggcgaaggagcgcaacgctggcgaaggtttcggcgacttcaccgttcgcgcgggcgtcgtcaaaccggtgctggatccggcgcgagatttctgggagtgaggccgggcggtccctgggcagaggggccgcacagataatttcaagtatcaggagagacaacatggctgaattcgatctggcggcgctgaacgcgttgcccaaatccgggcaggcgctggcattggcggtggtcaacggccaactggagaccctcagcgccgaacagcgcgttgaatgggcgctggagcacctgcccggcgagttcgtactctcgtccagtttcggcattcaggcggcggtatgcctgcacctggtgacgcgtatccgcccggatatcccggtgatcctgaccgacaccggttatctgttcccggaaacctatcgctttatcgatcaactggccgaccagctgaagctgaatctgcaggtgttccgcgcggagcagtctcccgcctggcaagaggctcgctatggcaagctgtgggagcagggcgtggaagggattgaaaaatacaaccagatcaacaaggtcgagccgatgaaccgcgcgctggagacgctgggcgcgcagagctggttcgccggcctgcggcgcgagcagtccggcagccgcgccaatctgccggtcctggcggtgcagcgtggggtgttcaagatcctgccgatcatcgactgggacaaccgcaagatttaccagtatctgaccgaacatgggctgagttatcacccgctgtgggagcagggctacctgtcggtaggtgatacacacaccacccagaagtgggagccgggcatgagcgaggaagagacgcgtttcttcggcctgaagcgcgagtgtggcctgcacgaaggctaaacggcgtgattgacatgacagggctcagcaatgctgggccctgtttttttgcgggctactttttcttctgtgctttcggcgggtgcgcctgcgccagctctttgatcagcggcagcaggatctgcacgctgtcgcggctgcgtttgtcgatccgccccggcaggtagcgatccagatactgcagattgtcatactgcggacggtgccaggtgatgccctgcgggaagtgcgggctgacggcgcgctgctggtagccatctttgtcgcccagcgaccagttggtggcctccaccgacagcaccgggatgcccgcggcgtcgaacacctcttgatcggagcagcagccggtaccctgcgggtgctgtgcgctgcccggattggtggcggcggcgatgccatagcggtgggcgatatccagcgcgcgatcgcgggaacgcttcgccatttgcggcggcgtgttgcgcccggcgttgaaatacagacgatcgccggtgatcaggctgtcgaggttgatcaccagtacggtgttgcttttctcttccgcgctcatgcgctgcaggtagttctgcgcccctagcgaaccgatctcttcggcgctggtggcgacgaagcgcaggccgtaggcggtggggatgttcttcaggcgttccgccagttccagcatcacgccgatgccggaggcgttgtcgtcgacgccctgcagcgtcaagccgccgagattgttatccagatcttcgtcgctctgcggcgtataggtgtcgaagtgggcgacgatcactatctgtttcgggctgtcgccgttgcgggcggcgatcaccgagctggcggtgacgttgttccagttcttcttgccgtctttgctggtgtagagatagcgcgtattgacgctgcgaatatcgctttggtagcccatcttgctgaactgctgcttcaggtagtcggcggtgagcaattcggccgggctgcccgccatgcggccggggaagtaagtggcgatgtggcgggtctgttcggcggcgaaacggcccattggcgcgtcttttgcgggctgtgcggcacacacgctgaagacgccgccgagtgcgagggccagcaggctggtcttcaggtaaaaacgggaaaacataccgaaaaatccttctttgctatcggcgctgccgatcatttttctgcggcacccagtatgagacgccgggcggcattacacaatttccctgtctcttaatttcgcgcgaacgcgcaaagcatcgcctcgattatcaccgtttgcctcctgcgctgcggcctatattccataaaggaactaatcattccttttcgtcatttcagaggctaaatctcagcccgtatagtcacactatctttctgttatatgaaaaggctgttgtggactatctaccaatattcgccgacctgaaacaacgtccggtgctggtcgttggcggtggtgacgtggctgcgcgcaaagtcgatctgcttcagcgcgccggggctgaaatacggatagttgcgcagtcactctcaccggaactggaacaacaacgtcagctggggcgggtgctctggctgggggaaagctttgatccgcagcagttggacgacgtgtttctggcgatcgccgccacggacgacaacgcgctgaacgccgcggtgttcgccgaggcggataagcgccgggtgttggccaacgtggtggacgatcagccgcgctgctcgttcatcttcccgtcgatcatcgatcgctcgccgctggtggtggcggtgtcgtccagcggccaggcgccggtgctggcgcgcctgctgcgcgaaaagctggaggcgttattgcccgccagtttggggcagatggcgcaagtagcgggccgctggcgcggccaggtcaaacagcggttggcttcgatcggcgaacgtcgccgtttctgggagaaaacgttcggcggccgtttcgccacgctggtggccaacggccagacggcgcaggcggaacggcagctggagcaggatttacaccacttcgccgcaggcgatgaaggcgcacagggcgagatcgccctggtgggcgccgggccgggcgacgtggggctgttgaccctgcgcgggctgcaggtgatgcagcaggcggacgtggtgctgtatgaccatctggtcagcggcgagatcctcgatctggtgcggcgcgacgccgagcgcatctgcgtgggcaagcgcgccggcgcgcactcggtgatccaggaagagaccaaccggctgctggtggagctggcgcagcagggcaaacgggtggtgcgcctcaagggcggcgatccgttcatctttggccgcggcggcgaagagctgcaggtagccgccgccgccggcattccgttccaggtggtgccgggcgtcacggccgccgcaggggcgaccgcctacgccggcattccgctgacgcatcgcgaccacgcgcagagcgtgacctttatcaccggccactgccgccccgacggcgatggcctggactgggccgatctggcccgggcgcggcaaacgctggctatctacatgggcaccatgaaggcggcggacatcagccaacgcctgatcgcccatggccgcgacgctgcgacgccggtggcggtgatcagccgcggcacgcgcgccgatcagcaggtgcagatcggcacgctggatcaattggaactcctggcccaacgggcgccgttgccggcgctgttggtgatcggcgaggtggtggaactgcatcatcaaatcgcctggttcgggcatcaatcgcagacggaaggggccgcgcgcccggccgtcgtgaatttggcataggcaaggcttttaaggacctgttatggacgaaaaacgactcactcatttgcggcaattggaggcggagagtatccatatcatccgtgaagtcgccgctgaattcgccaacccggtgatgctgtattccatcggcaaggactcttccgtgatgctgcatttggcgcgcaaggcgttcttccccggcacgctgccgttcccgctgctgcacgtcgataccggctggaaattccgcgaaatgtacgaattccgcgatcgcaccgcgaaggagtacggcttcgagctgctggtgcataaaaacccggaaggggtggcgatgggcatcaacccgttcgtgcacggcagcgccaagcataccgacatcatgaagaccgagggcctgaagcaggcgttgaacaagtacggttttgacgccgccttcggcggtgcgcggcgcgatgaggagaaatcgcgcgccaaagagcgcatctactcgttccgcgatcgcttccaccgctgggatccgaaaaatcagcggccggagctgtggcacaactacaacggccagatcaacaaaggggagagcatccgcgtcttcccgctgtcgaactggaccgagctggatatctggcagtacatcttcctggaaaagatcgacatcgtgccactgtacctggcgaaaccgcgcccggtggtggagcgcgacggcatgctgatgatggtggacgacgatcgcatcgatctgcagccgggtgaagtgatcagccagcgcatggtgcgtttccgcaccctggggtgctggccgctgaccggcgcggtggactcgcaggcgcaaaccctgccggagatcatcgaagagatgctggtctccaccaccagcgaacgccaggggcggatgatcgatcgcgatcagtccggctcgatggagctgaaaaagcgtcaagggtatttctaaggagccgccggatgaacaacgcaattgcacaacaaatcgctgaccagggcggcgtcgagtcctatctgcacgcgcagcagcacaagagcctgctgcgctttctgacctgcggcagcgtcgacgacggcaaaagcaccctgatcggccgcctgctgcacgatacccgccagatctacgaggatcagctgtcgacgctgcacagcgacagcaaacgcatcggtactcagggcgaaaagctcgatctggcgctgctggtggacggcctgcaggccgagcgcgagcagggcatcaccatcgacgtggcctatcgctatttctcgaccgaaaaacgtaaatttatcatcgccgataccccggggcacgagcagtacacccgcaacatggccaccggcgcctcgacctgcgatctggcgatcctgttgatcgacgcgcgcaaaggggtgttggatcagactcgccgccacagctttatcgcgaccctgctgggcattcgccatctggtggtcgcggtaaacaaaatggatctggtggactatcaggaagcggtgttcgagcagttcaaacaggattacctgaccttcgcccagcagctgcctggcgatctggacatcaagttcgtgccgctgtcggcgctggacggcgacaacgtggcgagcgaaagcgcccatatgccgtggtacagcggcccgacgctgctggaagtgctggagagcgttgacgtgatcagcgagcgagaaaaccagccgctgcgcttcccggtgcagtacgtcaaccgcccgaacctcgatttccgcggctatgccggcacgctgtccgccggcgtagtgcgggtggggcaacgcatcaaagtgctgccttccggcgtggagtccagcgtggcgcgtatcgtgaccttcgacggcgatctgccagaagcggtgccgggcgaggcgattacgctggtactgaaagatgaagtggacatcagccgcggcgatttgctggtcgacgccggcgaaagtctgcaggcggcgcagagcgcgcgggtggacgtggtatggatggccgagcagccgctggtgccgggccagagctacgacatcaagatcgccggcaaaaagacccgcgcccgcgtggagagcattcgccatcaggtggagataaacacgctggcgcaacacccggccgacacattgccgctcaacggcatcgggttggtggagctgaccttcgacgaaccgctggtgctggacagctatcagagcaatcacgacaccggcgggctgatcttcatcgatcgcatgagcaacgtgacggttggcgccggtctggtgcgtgaaacgctgcaggatgcctcggcggcgcgcggcgaattcagcgccttcgagctggagctgaatgcgctggtgcgcaagcacttcccgcattggggcgcacgcgatctgctcggtggccgataaggtggccgctgaactgagggcgaccgggccggacgatgagaacgtggtttggcatccgcatgcggtgacgcgtgcggatcgcgaagcgcgcaacggccaccgcggcgcggtgctgtggtttaccgggctgtccggctcgggaaaatccaccgtcgccggcgcgctggagcaggcgctgcatgggcttggcgtcagcacctatctgctggacggcgataacgtgcgccacggtctgtgccgcgatctcggtttttccgacgaggatcggcgcgagaacatccgccgggtgggggaagtggccaagctgatggtggacgccgggctggtggtgctgaccgcattcatttcgccgcaccgcgccgagcggcaaatggtgcgcgagatgctcggcgacgatcgctttatcgaggtgttcgtcgacacgccgttggcgatctgcgaggcgcgcgatccgaaagggttgtataaaaaagcgcgcgccggcgagctgcgcaatttcaccggtatcgacgcggtttatgaggcgccgcagcagccggaaatccacctcgacggccaacaattggtaacaaatttgattgcgcaattgttagacgtgttgcgtggtcaggctattatcaaaccctgaattaaaaaaaagcgtgtggcgtttttcgccatgcgctttttactctaagccgccgcagagcgagccgaataaccagggatcactatgcaaaatgtcacgcctatcttgatcgactccaagcagtcaaaacaggagagagaggagccttcttattctttcctgggcggcgtcagcggctttgttttctactggctggcgttcgcgttgccgtttctggtttacggttccaacacgctgtttttcctgctctatacctggccgttcttcctggcgctgatgccgctgtcggtgctgatcggcatcaccctcagcatgctgttgcgcggccgtctgatcctgacgctgctgctgaccggcgcgatcgtgctgtgcctgttctggctggtgttcagcttcctgaccgggtggtgagagagcgggcgccgatgccggcgcccgaaggattgcaaagccgtgtcgaaggttacaaaactttgctcagaaacgcctgcgtgcgtggattggccggctggctgaagatctgctgcggcgcaccctcctcctgaatgatcccctgatcgataaacagcacccggtcggccacctcgcgggcaaagcccatctcatgcgtcaccaccaccatggtcatgccctcgtgggccagtgatttcatcaccgccaacacttcgcccaccagctcaggatcgagtgcggaggtcggctcgtcgaacagcatgatcttcggctccatcgccagcgcgcgggcgatcgctacccgctgctgctggccgcctgacaggctgttggggtaggcgtcgatcttgtcgagcaggccgaccttgagcagcagctgttctgcttgcgcgatggcttcggcgcgcggctgtttcttcacgctcaccggcgccataatgatgttttccaacaccgtcatgtgcgggaacagattgaaacgctggaacaccatgcccacgctttcccgcattttgttcaggtcggttttctgatcgtggacggcgaagccgttcacctcgatctcgccgccggagagcgtttccagcgcgttgatgcagcgcaggaaggtgcttttgcccgagccggaggggccgatgacacacaccacttcgttggcggcgatctggcaagaaatgccgcgcagcacgtggctttcgccgaactgtttttgcaggttatgtacgcgaatcacttttaccgaacctcttttccatatgctgcaccagcagcgagagcaggaaggtgatgacccaatagaccagcgaaatggtcagatagggctcccagtaggtggcgtaggcgccggagacggtacgggcggcataggccagatccgccaggccgatggcggaggccagcgacgaatccttgacgatggcgatggcgttgttgcccagcggcggcagcatgcgccggaaggcctgcggcaggatcacctggcgcatggtcttgccatagctcatgcccagcgagcgtgaggcttccatctggccgcggtcgatagactggatcccggcgcggaagatttccgacacataggcgccggcgttgagcgtgatcgccaccacgcaggagagaaaggcgccgtagtcggcgcgcagcgcacgggcgaaatcgacgctcatcagaccgctggtgaccagcagaccgtcacgcgggttgatgaacagcggcaccagcgcgaagtgcaccaccatgatctgcacgaacagcggcgtgccgcgaaaggcgctgatgtagatgcgtaccggccactgaacgccgtaatgcaggatgggtttccagatgccgtgcggcgcctgcgccaaacggcccagcccgaggatcaagccccaggtggtgcccagcagcacgcagataatggtgcatttgatggtcatccaggcgccttccataaacagcggcgcgtattcctggatgatctcccagcggaagttcaaggggtattccttcttggtaggctgaaacggtggtgcgccgacgcccttgcgggcgccggctactggggattattccgccggcagcgtcggtacgttgctgtcgaaccaggtttggtagatcttggcgtaggtgccgtcggcgacgattttcttcaggccggcgttgatcttgttgcgcagctcatcgttgcctttggcgacggcgatgccgaaatactggcgctcgaacttggcgtcgggcaccagcttgaaggctttctcagggtgggtcttgatatagaacttggccacgccgacgtcgccgaccgccgcgccgatgccgtcttcatacagctcctgcagcatcagcggggtattgtcgaagcgcttgatggcggtgctgtttttacccagcgcgtcggacaccacgatgtcgccggtgctggagttcaccacgccgaccttaagcgctttcagcgcggcgatggagtccaccgtcgagtcttgcggcaccacgatagcctgctcagccgggaagtaaggcgcagagaaatcaaccatctgcttgcgtttatcggtgatggtgatgccggaaatgatgatatcgcgatcgccggagttcagtgtggcgaagatcccttcccacggcgtattgatcagtttgatttggaagccttcggccttggccaccgccttgatgatgtcgatgtcgaaaccttccagctgcttttggctgttttcaaattcgaatggccgataggtgccgccggagccgacgacgtaggtgggttcagccgccaacgcagcgatggagaaggtggcggccaggcaggcgccgatcagaactaaacgttttaacatcgcgatccccgataatgaatggttatatattggaattatttatgcactatgagtgcataaaaataagcttcaatgaatgaaagtgcaaccgctgcatgacgattattctctctatggtgttaaatattcactttttgctttgctttggcgtaagcgatgtgtcaggaagcggtgatgcagtgattcttgctgcataatggaggtaggatagagtgtgtctcattggaaaacgcggcgcgtgcgccgagccaaaggggcgttttttgccgctttcgcagcggaattaggcgataaacacgggaacccttcatccgtattctgaatttggcgttgaaatgccgctctcagtgtggagtccaacgagaagttgtgggatgattggtcggtttttcagggggcggagatgggaaaacttacgctgctattgctggcattgctcggttggttacagtattcactgtggctgggcaaaaatggtattcacgattacgtgcgagtcaatgaagacgttgcggtccaacagggtagcaacgccaagttgaaagcgcgtaacgatcagctgtttgccgaaatcgatgatttgaacggcggtcaggaagcgatcgaagagcgtgcgcgtaatgagctgggcatgatcaagcccggtgagactttctatcgtctggttcctgaccaatccagacgcaacgcggcgtcttcctcgcaaaataacgcacaaaaataacgcatgaatcactccgcaggcacctttccctcggtgattgccgtcctgcccgctgccggtatcggcagccgcatgcaggcggaatgcccgaagcaatatttaaccattggccggcacagcatcgtcgaacacgccatccacgccctgttgcgccacccgcgcattgaacgggtgatcgtggcgatcggccccgaagatcgtcagttcgaacggctacccatcgctcaggatccgcgggtaaccgtcaccgagggcggcaaacagcgcgccgattcggtgatggccgggttgaaactggcgggtgatgcggactgggtgctggtgcacgacgccgcgcgcccctgcctgcacgccgacgatctcgagcgcctgctggcgatcaccgcacacagcaaggtgggcggcattctcgccgcgccggtgcgcgacaccatgaagcgcgccgaacccggccgcgacaccatcgcccacaccgttgaacggcaggatctgtggcatgcgctgacgccgcagctgtttccgctgccgctgctcaagcagtgcctgcagcgcgcgctggatgaaggcgcgaacgtcaccgacgaagcctcggcgctggaacattgcggctatcatccgcagctgatcgccggccgggcggacaacattaaagtaacgcggccggaggatttggcgctggcggcgttctatttgacccagttagacaattaaggagcgcatcatgcgtatcggtcacggttttgatgtacataaattcggcggcgaaggcccgttggtgatcggtggtgttcgcatcccttacgacaaaggcttgctggcccactccgacggtgacgtcgcgctgcatgccgccaccgacgccctgctgggggcggcggcgctgggcgatatcggcaaactgttccccgataccgatccggccttcaaaggcgccgacagccgcgagctgctgcgcgaagcctggaaacgcatccgcgccaaaggttaccgcctcggtaaccttgatatcaccatcatcgctcaggcgccgaaaatggcgccgcacatcccgcagatgcgcgtcttcctggcggaagacctgcagtgccatatggatgacgtcaacgtgaaggccacaaccaccgagcagctcggtttcaccgggcgcggcgagggcatcgcgtgcgaagcggtcgccttgctgatcaaggaataaccgcatggatatggcgaatctgacctggctgcatggccggccgcagagttccggggtgttgaaagccaatccggaagatttcgtggtggtcgaagatctgggctttgcgccggacggtgaaggtgagcacgtgctggtaaatatccgtaaaaacggctgcaatacccagttcgtggccgactatctggcgcgcttcgccggtattcacgcccgttccgtcagctatgccggtttgaaggatcgccacgcggtgaccgaacagtggttctgcctgcatatgccgggtaaggacacgccggatttctcccggtttacgctggaaggctgcgaggtgctctcgttcgcccgccacctgcgcaaaatgcgcatcggcaatctgaagggcaaccactttacgctggtgctgcgccagatttccgatcggcaggacgtggaacgtcgcctgcaggccatcgccgcgcagggcgtgccaaactatttcggcagccaacgcttcggccgcggcggcaacaacctggtgatggcgcgccgctgggcgaacgacgaaattcgtgtcaaagagcgcagtaagcgcagcttctacctgtccgccagccgcagcgcgctgttcaatctgatcgcgagccaacgcctggctgacgggctgcagcgcaccgtgctggaaggggatgccctgcagctgagtgggcgcggcagctggttcgtcgccaaagccgatgagctggagacgttgcagcaacggctggatgccggcgagctggcgatcacggctcccttgccgggcgacggtgagccaggcaccgccggccaagccttggcttttgaacaacaatgcttggcggaacaaccggaattgcttacgcttttaaagcgcgagcgtatcgaacccgctcgccgggccctgctgttgcagccgcaaaatttgcagtggaactggtgggatgacgttaccgtggaactgcgcttctggctgccggcgggcagctttgctaccagcgtggttcgcgagatcatgcagcaggataacagtgatgcggatattgctgagtaacgatgacggcgtcagcgccccgggcattcaggtgctggcggcggcgctgcgggaattcgccgaagtgcaggtcgtggcgccggatcgtaaccgcagcggctcttccaatgctttaacgctggagtcgccgttgcgcacgcagacgctggccaacggggatattgcggtgttgcaagggacgccgaccgactgcgtttaccttggcgtcaacgcgttgatgcgcccggcgcccgatatcgtggtatccggcattaacgccgggccgaatttgggcgacgacgttatctattccggcaccgtcgcggcggcgatggagggccggcacctggggttgcctgccttggcggtgtcgctgaacggccaccagcactacgcgaccgccgccgccattacctgccgcatcctgcgcgcgctgcagcgcgaaccgctacgtaccggaaaaattctgaatattaacgtgccggatctgccgctggctgagatcaaaggcctgcgcgttacccgctgcggcagccgccatcccgccgacaaggtcttctgccagcaggatccgcgcggacaaaatatctactggatcgggccgcctggtgataaatttgatgccgggccggataccgactttgcggcggtggaacaaggctatgtggcgataacgccgctgcaggtggatttaaccgcctacgcggcgcaagaagtcgtgaaaacatggttaaccaaggcagaggttagcggggaatggtgaataagcgcatgcaaacattgctgacgcagctgcggcagcaggggatccgagacgaaaagctgctgcgggcgatcgaagcggtgccgcgcgagcgttttgtcgatgaagcgctggatcataaggcctacgaaaacaccgcattgccgatcggttccggtcagaccatttcccagccttatatggtggcgcggatgaccgagctgctgaatctgaaacctacctcaagggtgctggagatcggtaccggttccggttatcaaaccgctatcctggcgcatctggtgcaacacgtttgttccgtcgaacgcatcaaggggctgcagtggcaggccaagcgccgcctgaaacagctcgatcttcacaatgtttccacccgccatggcgacggctggcagggttgggcgtcgcgcggcccgttcgatgcgatcatcgtcactgccgcgccgccggagatcccgcaggcactggtggagcagctggacgacggcggcattttggtgttgccggtgggcgagcaggcccaaaccctcaaacgcattcagcgtcatggcaacgatttcgttgtcgatgcggtagaggcggtgcgctttgtgccgttggtgaaaggcgaattggcctagcgattgtctgaattttcgaccgtctgcaaaatctgttgcactttcatcatggccggataaggttttctcgttccaatcaggctaattttcactagaattggcctttctacgtagttgtcttatggtgcggcaacgccaatgtggttagcattggcgcgcgttttgatgctccggcgcgagatgacctggcgttcagggatcggccggcggcgcctttacatcgcagaaactgggaagtggcaaaagctcggctacgatgtaaagggtattttggatatatcactgatattgctgtcatgggggaagcatgagcacgggaagcccaatgattacgttacgccgggtagcggtgtgtacgatggtaagtttgtggttggcgggttgtacgaatacggcctcgacgtcggctcctatcagcagcgtggggggcggcggtgccgctccatccggcaataataatggcggagtgcagcaggccagcccagagggccgcattgtctataaccgcagttataacgccatccctaaagggagttacagcggcggcgaaacttatacggtcaagcgcggcgacacgctgttttatatcgcctggatcaccggcaatgatttccgcgacctggcgcagcgcaacaatattcccgagccatacagcctgaatgttggccaaaccattcagcttggtaatggttctgccaacggcggcggcggcatgttggcgacgacagatgcgaccaaaggcggtgttccgaagccaccttccagctcccagatccagacggcaacggttgattctcaatcaactaacgcgtattctgaaaactcgggtaaacagaatgtaggtaagatgttacctgcagcaggtgccgcagcggttgggaccgcgactgcgcctgttaccgcgccggaagccgctccacctgtgagcagcaccgtcagcaacagcgctccggtcagtacctggagatggccgactgacggtaaggttattgataacttttcctcatcagaaggtgggaataagggtgtcgatatcgccggttcccgtgggcagcctatcttcgctaccgccgatggccgcgtagtgtatgcaggcaacgctttacggggttacggtaatctaatcatcatcaaacataatgatgattacctgagcgcctacgctcataacgacacaatgctggtccgggaacaacaagaagtgaaggcgggtcaaaaaatagccaccatgggtagcaccggtaccagttcagtacgtttgcattttgaaattcgttacaaggggaaatccgtaaacccgctgcgttatcttccgcagcgatagattgggcagaatacgctgagattctgctcgcggtatcacgggtaggagcagcatatgagccaaaatacgctgaaagttaacgagttacatgatgatgcggatttcgacgagaatggagctgaggccgagtcgtttgatgaaaaagcgctggtagaagaagagaccagcgagaacgatttagcggaagaagagctgttgtctcaaggcgttacgcaacgcgtattggatgcgacgcagctctatctgggtgagatcggttattcacctctgctgaccgcagaggaagaagtctattttgcgcggcgtgctctgcgcggtgacgtgccgtcccgccgccgcatgattgaaagcaacctgcggctggtggtgaaaatcgcccgccgctacagcaaccgcggtctggcgctgctggatctgatcgaagagggtaacctcggtctgattcgcgcagtggaaaaattcgacccggaacgcggcttccgcttctccacttatgcaacctggtggatccgtcagacgattgaacgggcgatcatgaaccaaacccgtaccattcgtttgcctatccatatcgtcaaagaactgaatgtctatctgcgcaccgcgcgcgagctttcccacaagctggatcatgaaccgagcgctgaagaaattgccgagcaactcgacaagccggtggatgacgtcagccgcatgctgcgcctgaatgagcgcatcacctcggtggatacgccgctgggcggggattcggagaaagcgctgctggacattctggccgacgagaaggacaacgggcctgaagacaccacgcaagatgacgatatgaagcaaagcatcgtcaaatggctgttcgaactgaacgccaaacagcgtgaagtgttggcgcgtcgtttcggcctgctgggctatgaagcggcgacgctggaagacgtaggccgggagattggcttgacgcgcgagcgcgtccgtcagattcaggtagaaggtctgcgccgtctgcgtgagattttgcagatgcagggcctgagcattgaggcgctgttccgcgaataacgccggttgttgaaccgcatcaaataaaaacggtgagcatgatgctcaccgtttttttatgcccgcgtttggcgccagattacaccatatttttcagccggtagatccattccagcgcctgtcgaggcgacagggagtctggatcaagcgcctccagggcttctactgccggcgaggtctcttcctgcagcagcgtcatctgggtggcatcgacgctgcccgacgcggtgtggctggagatggattccagctcgcgcagtttctgacgggcgcgtttgatgacgtcgcgcggcacgccggccagtgcggcgaccgccaggccatagcttttgctggcggcaccgtcttgcacgctgtgcatgaaggcgatggtgtcgccgtgttcaagcgcatccagatgcacgttgaccacgccttccatcttctcaggcagggtcgttagctcgaagtagtgggtggcgaacagcgtcatcgccttgatgcggttggccaggttctcggcgcaggcccaggccagcgacaggccgtcgtaggtggaggtgccgcggccgatttcatccattaacaccaggctgtgctcggtggcgttgtgcagaatgttggcggtttcggtcatctccaccatgaaggtggagcggccggaagccagatcgtccgccgcgccgacgcgggtgaagatgcgatccaccgggccgatggtggccttggtggccggcacgtagctgccgatgtgcgccatcagcacgatcagcgccgtttgccgcatataggtgcttttaccgcccatattcggaccggttatgatcagcatgcggcgctgcggcgacagggtgagcgggttggagataaacggctcgctcagcacctgctccaccaccggatggcggccttcggtaatgcggatccccggctgctcgctcatggtcgggcaagcgtagttcagggtatcggcgcgctcggccaggttggccagcacgtccagctcggccagcgcggcggcgctttgttgcagttccgccaggtgcggcagcagcagatcgaacagctcgtcgtacaggcttttctcgatcgccagcgccttacccttggaggtgagcactttgtcttcgtactctttcagttccgggatgatgtagcgctcggcgtttttcagcgtctgacggcgtacatagtggatcggcaccaggtggctttgaccgcggctgacctgaatgtaatagccgtgtacgccgttgaagccgaccttgagcgtatccagacccagcttttcacgctcgcggatctccagccgatcgaggtagtcgctggcgccgtcggccagtgcccgccactcgtccagttcgctgttgtaaccgggggcgatcacgccgccgtcgcgcaccagcaccggcggtgattcaatgaccgcgcgttccagcagctcgcgcagttcgtcaaactggcccacctgcgacagcagctgctgcacgtgcggcgttttcacatcctgcagcagcgcgcggatgtccggcagttgctggaaagcatggcgcatgcgcgccagatcgcgcggccgggcggtgcgcagcgccaaacgcgccaaaatacgttcctgatcgcctacctgacgcagcgaaggctgcagatccgcgaacagttcttgtaatgcgccgatcgcctgctggcgggcggtcagcaccttgatgtcgcgggtcggcatgtgcagccagcgtttcagcatgcggctgcccatcggcgtgaccgtacggtcgaggatcgccgccagcgtgttgtcgctgccgccggacaggctctgcgtcagctccaggttgcggcgggtggcggcatccatgatgatgccgtcctgctggcgttccatggtgatgccgcgaatgtgcggcagcgaagtgcgttgggtatctttgacgtactgcagcagacagccggcggcgcgcagcgcctggtgcgcctgctcgacgccgaagccggtcaagtcgcgggtgccgaactgcaggttgagctgttggcgtgcggtctcaagctcgaattcccacagcgggcggcggcgcaggccgtggcgctgttcgatcagcgccatgtgttcgaaggtttccggatagagcagctcggccggattggtgcgctgcagctcggcggccatggtttccagatcctgcggctcggcgacgcggaagcggccggagctgacgtccagcgtggcgtagccgaagccgcgcgcgtcctgccagatcgccgccagcaggttgtcctggcgttcttgcagcagcgcttcgtcggtgatggtgccgggggtgacgatacgcaccactttgcgttcgaccggccctttgctggtggccggatcgccgatctgctcgcagatggcgacggactcgccgagctgcaccagcttggccaggtagttctccactgcgtggtgcggtacgccggccatcgggatcggttcgcccgccgaggcgccgcgtttggtcagcgagatatccagcagttgggaagcgcgcttggcgtcgtcgtaaaatagctcgtagaagtcgcccatgcggtagaacagtaggatttcaggatgctgggccttgaggcgcaggtactgctgcatcatcggcgtgtgcgaatcgagtttatcggtgctattcatgcgattatttttccaatccattgaatgtaaagggaactgtgattttcattgtcgtcattcgctatcacattgtttcagcaggcgccaccccattcagcgcttggcgggcggcgcaaatcaaattatcaatacgccaaacggcgcgctcaaacccgaggtttgcacagacgcttatactagcccagcgggcaatcggctgtcacaggtaaaaatgggaagcgctgcgcaaggccggtttgcaacgaagcgagattgtcgttcgcctgcgggcaacaacgcaagtgtcgccgcccgcagtagtagtggagaggttattgcgcggcggtgagaggcaagggcagttgatagaggcggaaactgtcgggcacttcggtttcatggccgggcagcaggcggtggcggatgcgcgattcgctgacgaaggcgcagccttgcggagcgatagtcaggttgaccggcgattccatgccttcgcgtaagacctcaagctggtgcatgcctgccgccttgggtgacgggatccgcaggatccgcccttggccgctctggatcccgttttccagcacgatcagcgcgccatccggcgccaatcccattccgtccgggttttcgatgaggcgcggcagctgcatttccgtcagctgcggctttggagcgttataactgagggtgtagagcttaccggtaccgaaattggcgacagccatcagccgatcgtcgagcagcacgatgccgccgccgcgggtttccgtcacctacaccgtaccgtctgcgccgagtacgatatcgttgcccatttcgcccgccggcagcgccaggctgcggttgagcgtgccatcggcgacgttcagcgcatagatgcggttggcgcgcgttttgccgccggagaggaagtccggcgaattgccccacagcagcccacgtttttcgtccagccgcagcgcgtttgaggcgaacaccgtgtcagcgctggggaaaaaggtttcccacgcttgacccggccgcttgcgcagcacgttgccgctggtgacaaagccgacatacagcgtaccgtccgtcgcacgggcgatgccgttggggtaaagtgcgccaggcggcagcgtcatgctgtttgcggcgcagtctgcgctggcggcagcctgcaccggagcgctaagggggaatgcggcagcgagggcgagcaacaccgctcgtgcggtaagcgcatatgacatgtcttctctcctggaatgacggaaaaggggctaccagcgatcggggcggacagcgtgcgccattggcgcctccagcgcggccacatcttccggtgatagcctgaggtcgagcgcagccagcgcatcctgcagatgatgtggcttggacatgcccaccagcggcgacgccacgccgggtttggccaacagccaggccagcgcgatttgcgctggtggaacgctgcgcgcggccgccacctccgcgaccgccgcgacggtgcgttctacctcgtttctgccgccgtaccaacggggcgcctgttcgtcggtggcggcgcgcagcgtgccgccgctgccggagccggccagcacgccgcgggccagcggcgaccagggggtcagaccaagaccttcctccaggcacagcgggatcagctcctcttcatcttcacgcgtcaccaggttgtattggctttgcagcgaaataaacggcgccaggcggtgctgacgttgaaaggccagcattttcatcaggcgccaggcgtgcagcgaggaggcgccgagatagcggatcttgcccgcccgcaccaggccatcgagggtgtcggcggtttcttcgatcggcgtttcggagtcgaagcggtgcagcacgaacagatcgaggtaatccgttcccagccgctgcaaggaggcgtcgacgctgtgcagcaggtgcttgcgtgatagcccccggctgttcggctgcgcgtccattggaaagtaggccttggtggcgatcaccacgtcttcacggcgggcgaacgccctcagcgcgcggccgagaatgcgctcgctttctccgccggagtaaatgttggcggtatcgaaaaaattgatgcccgcctccagcgcctcgcggataaaggggcgcgcttcatcttccttcagcacccagggccgccaggccggatcgccgtaggtcatgcaacccaggcagaggcgggacaccttcaggccgctgtcgccaagccgaacgtagttcatggcctcgtctcctcaacgcatgccggcgatggtgtaaccgccgtccaccagcaggctttggccggtgatgaagcgagcttcgtccgtcgccagccacagcgccacatcgccgatgtcttccgattcacccaggcggccggcgggcgtgtgggcgataaagggcgcgaaggccgcgctgtcagccacgctgccgcgtgccattggcgtgtcgatgatgccggggttgatgttgttgacgcggatgccctggccgctgtattcgagcgccaccgcgcggatcatcgcatcgagcgcgcccttgctggcggagtagctggatgagccggccagcgcgccgtgggtcagccaggaggaggtgttgatgatcacgccgcccgagcgctgagccaggaaggtttcaatctcatatttcatcgccagccagacgcccctgaggttaatggcgataacccggtcaaaatcctcgctggtctgctcggtgatgggggcgaagttgccgatgatgccggcgttgttgaaggcgacgtcgagccggccgtaatgggcggtcaccgtggcgatcagttggcggatatcgccttcctgagagacgtcggccacgatgggcagggcgtcgccgccggccagcgcgatgtcgcgcgccgtggcttcgatttccgccgcgcgtcggccggccagcgcgactttggcgccttcgcgggcataggccagcgcggcggcgcggccgatgccggtgccgccgccgctcaccagtacgactttgtccgccagacggcgcggcgtttcatgagttggagctgtagcattaatcatcgtatcgatacctggtaatggggtcgatcgcaatgctatgttgttagatgacggataactatccgctaaaaattcatctcactattagataatttatatcaatagcatgaaaaaacctgaactgtccggcctggcggcctttgtggctatcgccagtgaacgcagcttccgccgcgccgccgcccgattgggcgtgacgccgccgacgctgacccacaccctgcgcgaattggaagcgcaggtgggcattcgcctgctaaaccgcaccacccgcaacgtctcgccgacggaggccggtgagcatctgctggcacagctggtgcccgcttttaccgacatcgacgccgcgctggagagcctgaatgtgtttcgcgaagggccgcgcggcctggtgcgcatcaacgcgccgcgttcggccatcgatcttgccatcgtgccgcatctggagcggttggcctgcgagtaccccggcattacgctggaagtggtggcggacgaggggtttgccaacattgtcgaacagggctttgacgccggtattaggctcggcgaggatctgcacaacgatatgcgcgcggtgcgtctgacgccggatctgcgtttcgccatcgtcgccacgccggactattttcaacggcacggcgaaccgacgcatccacaggatttgctgcagcaccgctgcatcggttggcgcaaggcctcttcgggcgagcgctacaaatgggcatttcagcagggccagcagcggttttccgtggcggttaacagcccgttgatactcgatgacggcaggatgatggtgcaggcggcgctggcgcacgtcggcatcgctttcgccatcgaacaagaggtagaagaacacctggcgagcgggcggctgcggcgggtgttggccgactggtgcgcgccgtttaccggtttttacctctattaccccaaccgcaggaatcattccgtggcgctgagcacggtgatcgagttgctgcgtctgcccacctaatcctcttcaccggctatcgcgttcggatggctgtaggtgaatcaagcttgaactatttttattcccttttcgtttgttcaggcgcaaataaacccttaaattctcggtgagtttgtaacttgctgtttataattgttatttgaatatttattacgaatattccgagtttttatcggttatttgagagcccggtcacactatttttttgtgcgaaatgtgaagggggtcaatccgtcaggtcaatgagagacggttatgtctcctcctggcttaccgatccgtttttcatgctccgtatactgtccgtaaccagggcaacgtgacggaaattttcataaggaatgtgcgtgaagcaatcgtgattgcatctggcatacaaataacacggggtttttttgattatctgaggtgcttggtatggaaaagaaaaaaatctatctgttttgttctgccggtatgtccacttccctgttggtatcaaaaatgaaggcgcaggccgagaaatatgaagtgccggtgatcatcgccgcctatccggaagcgctggctgcggagaaaggcgttgaggcggatctgatcctgctggggccgcagatcgcctacaccttgccggaagtgcaaaaacagctgcccaacaaacctgtggaagtcatcgatccgctgctgtacggcaaggtcgatgggctgggcgtgctgaaggccgcggtggccgctatcaagaaagccaatcaataacaggaggccgccgtgaataccctcattgcctcgctcgagaaggttatcctgcctttcgccgtaaaaatcggtaagcagccccacgtcaacgccatcaagaatggctttatccgcctgatgccgctgaccttgaccggggcgatgttcgtgttgatcaacaacgtgttcctgagcttcggcgaaggatcgttcttctattcgctgggcgtaaggttggatgcctctaccatcgagacgctgaatagtctgaagagcatcggcggcagcgtttacaacggcacgctggggatcatgtccctgatgacgccgttctttatcagcatggcgttggcggaagagcgaaaggtcgatccgctcgcttcggcgctgctggcggtggcggcctttatgaccgtcacaccgttcaatgtcggcgaggcctatgcggtgggggccaactggttgggcggcgccaacatcatttccggtatggtgattgggctggtggtggccgagatgtttgccttcatcgtgcggcgcaactgggtgattagcctgccggacagcgtgccggcttcggtgtcgcgttccttctcggcgctgatccccggtttcatcatcctctccatcatggggctggtggcgttcgcgctggcgcactggggcaccaacttccaccagatcatcatggacggcatttcggcgccgctggccaagatgggcagcgtggtgggctgggtgtacgtactgttctcctcgctgctgtggttctttggggtgcacggttccatggcgctggcggccctggacagcggcatcatgacgccgttcgcgctggaaaacgtggagctgtacaacaaatacggttcggtcgaagcggcggtggccgccggaaaagagttccacatgtgggcgaaaccgttcgtcgactcctacatctacctcggcggcaccggctcgacgctgggcttgatcatcgccatcttcatcgcctcgcgccgcgaagattatcgccaggtcgccaaactggcgacgccatccggcatcttccagatcaacgaaccgatactgttcggcctgccggtgatcatgaacccggtgatgttcattccgttcatcctggtgcagccggtgctgaccattatcacctccctggcctactactccgggctgatcccgccgatcaccaacatcgcaccctggaccatgccggtcggcctgggggcgttcttcaacaccaacggcagcatcatggccatgttgctgagcctgttcaacctggcggtcgccaccgtgatctatctgccgttcgtggcgatctccaacaaggcgcagagccagatcgacgcggcgacggaaagcgaagaagacatcgccaaggcgctgaaattctaactgtggaacggggcggtgtggccgccccgcgagggacgcgagtatggaatatcaatttgccgacgggttctggtggggcagcgccacctccgcgccacagtctgaaggggcggccgcgcgggacggcaagagccgcaacatcttcgactattggtacgagatcgcgcccgagcgctttcacgagcgggtgggcccgaccgaagcctcgaccttttacgaccatttccgcaccgatatcgggctgctcaaaacgctgggccacaatacctttagaacgtcgatctcgtggtcgcggctgatcccggacggcgacggtgaagtgaacccgcaggcggtggcgttctataacgcgatgatcgacgagctgctggcgcagggcatcaccccgtttatcaatctctatcacttcgatatgccgctatgcatgcaacagcgcggcggttgggaaagccgggcagtggtcgaagcctatgcgcgttacgccgatacctgtttctgcctgtttggcgatcgggtcacccactggttcaccttcaacgagccgatcgtgccggttgaagccggttacctgaatgacctgcactacccttgcgtggtggacttcaaacgggcggtcaccgtggcgtatcacagcgtactggcgcacgccatggcggtgcagcgtttcagagcgcgggggctgccggggagcatcggcatcattctaaatctgagcccgacctatccgcgctccgacgcgccggaggatcggcaggcggcacacgacgccgatctgctgctcaatcgcagtttcctcgatccggtcgccaaagggcgttacccggccgcattgttgcacctgctggagcggcatgggctgatgccctactgcgaaccgcaggacgcgcagctgatcgaaggcggcgtggtggatatccttggcgtcaactattaccagccgcgcagggtgcaggcgaaagagggacggcgcaccgaggggccgatcgcatcgccggaggatttgttcagttactatgcaatgccgggccgcaaaatcaatccgcaccgcggctgggagatctatgagaaggggctgtacgacatcctgatggatctgaaagagaactacggcaatctgccctgttatatttcggaaaacggcatgggcgtcgagggcgaagaagcgtttatcggcgccgatgggcgggtggaggacgattaccgcatcgactttattcgcgagcacctgaagtggctgcaccgcgcgctggcggaaggctcgcagtgcaagggctatcatctgtggacctttatcgattgctggtcctggctgaatgcctacaagaatcgttatgggctggtgcggctggatcgggcggatcagcggcgcaccatcaaaaaaagcggttactggtttgccgaggcggccagacgcaacggatttgactaacgggaggccggcgccgtgtccgataaccgaatttcgctgagtgccaacgacgtgaagctgattcgcgagcaggatttctttaactgcaaagactttcacctgttcatctacaacaaggtggaaagcgccaccgggctgcatcagcacgactattacgagttcaccatcgtgctgagcggcaaatgctatcaggagatcaacggcaagcgggtgctgctggagcgcggggatttcgtctttatccctatcggttcctaccaccagagcttttacgagttcggcgcgacgaaaatcttcaacgtggcggtcagcaaagcgttctttgaagaacattacttgcaacagctgccgcgttgctttgtcgcctcgcaggcctacagcctgagaagcgagtttttggcctatatcgaatcggtggtgagttcgccgcagtttcgcgaggatgatttcgccgagtttctcgaaacgctgaccttctatgtgataagccgcattcgtcaccataaagaagaaaacgacggcggcgatgatatcccgcagtggctgaagaacaccctggccggcatgcatgacaaggcgatgttcggcgaaaaggcgttggcgaacatggtggcgctgtcggggaaaacccaggagtacctgacccgggcgatgcggcgctactaccagaagacgccgatgcaggtgatcaatgagatccgcatcaacttcgccaagacgcagctggaggtcaccaactattcggtctctgacatcgccttcgattccggctatggcgacgtcagcttgttcattaaaaacttcaagcggctcaccgacgtgaccccaggcaactaccgaaaaaagtgttacggccctctttagggccgctcccgatcagtatcaacgccgatatgccgatgagcttcagggcgccggtcggttaatcatttgatttttaccttaacgagggggaatgccgcgccgagcggtcggccttcccttgccaaaaatccatcccgcgggagcctctatggaaaaactactgatcgtgaatgccgatgatttcggcctgagcaaagggcagaactatggcgtcatcgaggcgtatcagcatggcgtcgtttcctccaccacgacgatggtgaacggcggcggcgcgcagcacgcggcggcgctcagccggcaatatccggggttgccgattgggctgcatttcgttttgacccatggcaagccgctgggcgccatgccttcgctggtcaacgaacatggcgaactgggcaaatggctgtggcgccgcgccgaggccggcgagctgcagctggacgaaattcacgaggagctgcagcgccagttcacgcgcttcgtgacgctgttcggccggccgccgacgcatatcgacagccaccaccatgtgcatatgcagccgcaaatttatccgctggtggaggcgttcgcgcaagcgcagggtctgccgctgcgtctcgatcgcgaagaggcgaaacggcgtggcatcacgctgcatgccccctatagcactgacgcttttgacgcgggattctacggtgagacgatttccgaaacgttgttcctgcaaaggttggcgcgcgccgacgagcagggcgcagaatcattggaaatgatgtgccacccggcgttcctcgacgcgacgatcctgcagagccaatactgccatccgcgcctcgtcgagctggatgtgttgaccgcgccgacgctgaaagcggcgatcgccgaacgcggttttctgttgggctccttccaggatctgtaacgccgccgtttacagcatggcgtgcgcctttttcaggccggtgtcttcttccggatcggcgccctgaggcaagggctccgcctcttgtgcttcgggctgcggctcgtcgacctcgggcgccgcttccggcggcggcatggtgtcgtgaatgatctgttcatcgaaggtcggattgagcgccggcgacagcggcgagctggtgaggctgtccggcagcggaatgtgcggcaccggcgcgtcctgcgccaactgcggttcctccgctttcgccgtgcggctgagggccgccagcagcacgccgcacagggcgaaaaaggcgtacaggatattgccgcccagcggctcgatcagcgcgccgaccgccaatggcccgatgctggcgccgacgccgaacgccatcagcagacaggcggccagcgagacgcggcgttccggctcgatcagatcgttggccagcgccaccgccaacgggtagagcgtaaattgcaacatgctgacgacgaacccgaccgccagcagcagcgggaaatcgatgtgcggcagcagcgccagcggcagcgccgccacgatcagaaaaatggcgttgaggcgcatcagcaacgggcgattatagcgatccgacagccaactgagcgggaactgcgccaccagcccggcgaagatggccagcgccatgaacaggccggtttgctgagtggttaaggattgcagactggcgtagaccggcgccaggccgtaaaacgagcccaccaccatgccgatcaccagcgtggtagccagcaccttgggaatggcgccgacaaagtaacgcagctccatcggggccggcgacatgtggcgcgcattggtgcgggtggtgagagcgatgggcaccagacaaagcgcgaagcacagcgcgatcaccagcagcgtgctgatgcccaggttgctttgcagcatcagcactatctgacccagcgacatgccgagataggtcgccgccatatagaagccgaacaccatgccgcgctggttggattccgcctggtcgttcagccagctttccagcaccatatactggcacatcatgcacagcccgatcaccagacgcagcgcgacccaggcgggaatgaacgccgtcagaccgtgccccagcaccgcagcggtgatgatgccggcgcaggccacgtaggcgcggatatgcccgacgcgggcgatgagaaagtggccgaccttgccgccgatcaccaacccgatgtagttggcggcgatgatggcgccgatcagcgcgctgctgacgtggatggaggccagccgcagcgagacataggtggtgagcaggcctgagcccaacagcagcaacagggtggtggtgtacaacggcaagaatacgcccaacgtttttttcacgctatcatcctaatctcttctggtgcgccctgaggccgccgccgcagcgcgccgcctccgtgatgttccttgtgctggtgcgccgccgctcaatggggcgcttcttttgatactagcagcttggccgggcgcttaaaaccgcacctcctgcgaggcgctgcgcatttctgcgcgccggccgccgcgtcgccttgataaatgctactatcgggcgcatatacctgaattcgcgagggaggggttatgagtgaaaaccaactgcgccggctcagcgtgctggcgggggaaaaactgaaggcgcagggccgctggatcacctgcgcggaatcctgcaccggcggcggcatcgccaaggccatcaccgatatcgccggcagctccgcctatttcgatcgcggtttcgtcacctacagcaatgcggcgaaacatgatctgctgggggtgagcgaagcgacgttgatggcgcacggcgcggtcagcgaagaggtggtgcgcgagatggcgataggggcgctgcgggcggcgcaggccgatctggcgctgtcggtgagcggcatcgccggcccggacggcggcagcgtggaaaagccggtcggcaccgtgtggttcggctttgccagcagcgatggccgggggctttcgcgcaagatgcaattcgagggcgaccgcgatgcggtgcggctgcaggcgacgattttcgcgctgcaaaccgccatcgacgaatttttgtaaattaggcttgatactgtatgaccatacagtataattagtgacatttcctgcacaacatacattcagtggcagtgtggggtaacaccggcattgcgaaacgaaggagcaaaaatggctattgatgagaacaagcaaaaggcgttagctgcggcactgggccagattgagaaacagttcggcaaaggctccatcatgcgcctgggtgaagaccgctccatggacgtggaaacgatctccaccggctcactgtcactcgatatcgccctgggcgccggcggcctgccgatgggccgcatcgtagaaatctacggcccggaatcgtccggtaaaaccactttgacgctgcaggtgatcgccgctgcgcagcgcgaaggcaaaacctgtgcgttcatcgacgccgaacacgcgctggatcctatctatgcgaaaaagctgggcgtcgatatcgacaacctgctgtgctcccagccggataccggcgagcaggcgctggaaatctgtgatgcgctgacccgctccggcgcggttgatgtcatcatcgtcgactccgtggcggcgctgacgccgaaggcggaaatcgaaggtgaaatcggcgattcgcacatgggcctggcggcgcgcatgatgagccaggcgatgcgtaaactggccggcaacctgaaaaacgccaataccctgctgatcttcatcaaccagatccgtatgaaaattggtgtgatgttcggcaacccggaaaccacgaccggcggtaacgccctgaagttctatgcttcggtgcgtctggatatccgtcgtatcggcgccatcaaagaaggcgacgaagtggtgggcagcgaaacccgcgtgaaagtggtgaagaacaaaatcgctgcgccgttcaaacaggctgagttccaaatcatgtacggcgaaggcatcaacagccgcggcgaactggtcgatctgggcgtgaagcacaagatgatcgaaaaagctggcgcctggtacagctataacggcgagaagattggtcagggcaaggcgaatgcctgtaacttcctgaaagaaaacccggctattgccgccgagctggataagaaactgcgcgacctgctgctgcatagcggcggtgaactggtagccgcttccggtgacgacttcgaagacgacgaagcggaaaccagcgagcagttctaatcgctgaagatgtgcgccgccgtatatgtggtgcatatcctctgaattcaggcttgaatgatgaatgacttgctaagccgcgccatgcgcctgctgtcgcaacgcgatcatagtgaagctgaactgcgccgcaaacttgcggcgcagccgtttgtggcgaaagcccggtttggcggtaaggggccacatgcgccggcatcaccgccggtggccgaagagccagtggatcctgcgctgatcgatcaggttatcgcctactgttaccagcacaactggctggatgataagcgtttcgcatacagctacatcggtagccgcagccgcaagggttatggcgcgcagcgcatccgcagcgaactgatgcaaaagggcgtggataaagcgctggtgcaggacgcgttggcggaatgcgatatcgactggtgcgaacaggcgaaacaggtggcgcagcgaaaatttggcgatgcgttgccaaccgactggaaagagaaagccaaagtgcagcgttatctgctctatcgcggcttcttccaggaagaaattcagtcaatttaccgtgattttgcgcaatgagcgcacacggggttttacttccctctgaagaaaatttatcttatccccactttttgttcgtgggctggttgtcatcgtcgggatgacgcgccaccggctcacgtgtcgttattctagcctttccaggaaaattatgagcaagagcaccgctgagatccgtcaagcgtttctcgatttctttcatagtaagggtcatcaggttgtagcaagcagctccctggtgcctaacaatgatccgacattgctgtttaccaatgccggcatgaaccaatttaaggatgttttcctggggctcgacaaacgcgcctattcccgcgccaccacctcgcagcgctgcgtgcgcgcaggcggcaagcataacgacctggaaaacgtcggttataccgctcgtcaccacaccttctttgaaatgctgggtaacttcagcttcggcgattacttcaagcacgacgcgatcagctacgcgtgggaactgctgaccggtgaaaactggttcaacctgccgaaagagagactgtgggtcaccgtgtatgaaaccgatgacgaagcattcgacatctggcagaagcaaatcggcgtaccggccgagcgcattatccgcatcggcgataacaagggcgcgcctttcgcttcagataacttctggcagatgggtgataccggcccatgcggcccgtgcaccgagattttctacgatcacggcgatcacatctggggcggccctccgggcagcccggaagaagacggcgaccgctacatcgagatctggaacatcgttttcatgcagttcaaccgtcagtccgacggcaccatgctgccgctgccgaaaccttcggtggataccggcatgggtctggagcgcatcgcggcggtgttgcagcatgtgaactccaactatgagatcgacctgttccgtaccctgatcgccgccgtagcgaaagtgaccggcgcgaccgatctggataacaaatccctgcgcgttatcgccgaccacattcgttcctgcgccttcctggtgtctgacggcgtgatcccgtctaacgaaaaccgcggctacgtgctgcgtcgtatcattcgccgcgcgatccgtcatggcaacatgctgggcgcgaaagataccttcttctacaagctggtagcgccactgatcgaagtgatgggcccggcggccgacgagctgaaacgccagcaatcgctggtggaacaggtgctgaaaaccgaagaggagcagtttgcccgcacgctggagcgtggtctggcgttgttggacgaagaactggccaagctgcagggcgatactctggacggcgaaaccgctttccgtctgtacgatacctacggtttcccggtcgatctgaccgctgacgtctgccgcgagcgtggtctgaaagtcgacgaagcgggctttgaagaagcgatggaagcgcagcgccgccgcgcgcgcgaatccagcggcttcggcaccgactacaacagcctgatccgcgtggatggcagcagccagttcagcggctacgatcacgacgagcagcaggcgacggtgatcgcgttgttccgtgacggccagccggtcgagcagatcaacgccggcgaagaggcggtggtggtgctggacgagacgccgttctacggtgaatccggcggccaggtcggcgataaaggcgtgctgaaagccgccggcgccgagtttgtggtcaatgacacccagaaatacggtcaggctatcggccaccaaggcaaactggcgcagggctcgctgaagctgaacgatcgcgtggatgcgcagatcgacgccgagcgccgcaacagcatccgcctgaaccactccgcgactcacctgctgcacgctgcgctgcgccaaacgctgggcgatcacgttgcgcagaaaggctcgctggttaacgacaaatacctgcgtttcgacttctcgcacttcgaagcgatgaagccggaacaaatccgcgcggtggaagatctggtgaaccagcaggtgcgtcgtaacctgccggtgcagaccgagctgatggcgttggaagacgccaaagagaagggcgcaatggcgttgttcggtgagaagtacgacgacaacgtgcgcgtgctgaccatgggcgacttctccaccgagctgtgcggcggcacccacgccagccgcaccggcgatatcggcctgttccgcattttgagcgagtcgggcaccgcggcgggcatccgccgtattgaagcggtgaccggcgcaggcgctatcgccacgctgcaccagcaaagcgatttgttgcaagacgttgcgcagttggtgaagggcgacagcaacaacctgaccgataaagtgcgctcggtgctcgatcgcacccgcgcgctggaaaaagaactgcagcaactgaaagatcagcaggcggcgcaggaaagcgcgtcgctgtccagccaggcgaaactggttaacggcgtgaagctgttggtcagccagttggacaatgtcgaagccaaaatgctgcgcaccatggtggatgacctgaaaaatcaattgggttcggccattatcgtgttggcgacgacggctgatgacaaagtcagcctggtcgcgggcgtgaccaaggatctgactgaccgcgtgaaagccggcgagttgatcggcaacgtggcgcagcaggtcggcggcaagggcggtggtcgcccggatatggcgatggcgggggggacggatatcaacgctctgccagcggcgttaaacagcgtagaagcctgggtggcctcaaagctgtgaacataaataaatagcacggacaaacgccataatactttgttgattatggcgttttcatactgtgctaacacaatttagttacaattgcgggaacaaagtttttctggtcggctaaacttaccattatctgaggtgggaccaagtctgcttacacttattgtggattgcgcggcttacgttttcaccacatatgatggataatgacggggaaactgagagacccgactcttttaatctttcaaggagcaaagaatgttaattctgactcgtcgagttggtgaaaccctcatgattggcgatgaggttacggtcactgtgctaggggtaaaaggcaaccaggtgcgtattggtgtgaacgcccccaaagaggtttcagttcaccgtgaagaaatctatcagcgcattcaggcagagaagtctcagcagacgacttactgattccgaagcagcgtctcgttgccagacgagacgctactgcatcgttttacccacttctttcgttctcccctctctttttcgtgattattttcccggtgagtttcctgctttattgctgcagacgttgcggttgcctgttgattaaacgccctttttgccgtgaaatcgcccatgttgggtgcgaattgtgcaaacgcgcatgagttgggaaaaattgtttgacttaaaagtcggagaaagtaatatgtgcgccacgcagtgccgatgagcttctccaaagcaagttaggcacaattcgaaagaagcgtatggtgaggtggccgagaggctgaaggcgctcccctgctaagggagtatgcggtcaaaagctgcatccggggttcgaatccccgcctcaccgccatttgcatccgtagctcagctggatagagtactcggctacgaaccgagcggtcggaggttcgaatcctcccggatgcaccatattttgcagtatggtggggtagtaacaacgtaccatacggtatcaaaaaagaattcctgtgcatccgtagctcagctggatagagtactcggctacgaaccgagcggtcggaggttcgaatcctcccggatgcaccatctaatagaagcccgccttagcgggtttttgcttttctgttattcgtgaaacagacaagcggcaaaaacagtcatgcatccgtagctcagctggatagagtactcggctacgaaccgagcggtcggaggttcgaatcctcccggatgcaccatgtttaacctcccgtatcgcgaagagaaatcgtcatgcgggtggtaaaaagaaagtgtccttggggaggataacgttgctttagcaacggcccgcagggtgaggcgttggcgccgaatcatcctcccggatacaccatctaagagaaacccgccctggcgggtttttcgcttttcagcatttagccattctctcttcccccctttcctgctttgtacccgatcgatcacagcacattccgctatgacgcagtcagcgacaacccaacggctttacgctaaagtagttttctttcctcaacgatcatggagtaacgatgtacgaccgctatcagggtcttattttcgacatggacggcacgattctggacaccgagccaacgcaccgcaaagcgtggagtgaagtgctgtcacgttatggcatgacgtttgatgaagcggctatggtggcgctgagcggttcaccgacctggcgcatcgctcaggcgattatcgccagccaccaggccgatctcgatccccatcacttggccgcggagaaaacccgcgcggtggaggcgatgctgttggacagcgtgcgcccgttgccgctgatcgaggtggtaaaatcctatcacggtcgtcgtccgatggcggtcggtaccggcagcgagcaccgcatggcggaaatgctgctgcgtcatctcggcctgttcaactgcttcgacgcgatcgtcggtgcggacgacgtacagcgccataaaccggagccggacaccttcctgcgttgcgccgaacttatcggcgtgccgccggaaaagtgcgtggtgtttgaagacgccgagttcggtattcaggcggcaaaaagcgccggtatggacgtggtagacgttcgcacgctgtgagtagtacgctagccgtaatatcgttatttggcagcagcttcctcagtgcgacgctgctgccgggaaattcagaaatcgttctggtcgctttgctgactcagagtcgcgtctcgccggaattgctggtgctggccgcgaccctgggcaacacgctgggcggcttgaccaatgtcattatcgggcgcctgttaccggcgttgaaaccacagcgggggctggcaacggcgctcgggtggctgcaacgcttcggcccggctgcgctgttgctcagctgggtgccggtggtgggcgatttgttgtgcgtgttggcaggttggctgcgcatgccctggggctctgtcgcgctgtttctgtgtatcggaaaagcgctgcgttacatcgttttggctatgataacggtacagggcatcgcctggtggcagtaaccaagtgaatataactcaatattctctcgggtgcggattcagtatgcttacgagttattgtttttagaagcgggaggtcaatttgatcccggacgtatcacaggcgctttcttggttggaagcccatcctcaggcattaaaaggcattcgtcgcggcatcgagcgtgaaacgctgcgagtcacgccgaacggcaccttggcgactaccgggcatccggaaaagctgggggcggcattgacgcatcactggatcaccacggatttcgccgaggcgctgttagagttcattacgccggttgatgacaatatcgatcacctgctgacgttcctgcgcgatattcatcgctacgtggcgcgcaacattggcgatgagcgcatgtggccgctcagcatgccgtgctttatcgaagccgagcaggatattgagctggcgcagttcggttcttcgaacatcggccgcatgaagacgctgtaccgcgaagggttgaagaatcgctatggcgcgctgatgcagaccatttccggcgtgcactacaacttctcgctgccgctggagttttggcaggcctgggctggcgtgcaggacgcagaaagtggtaaagagcagatctcggcggggtatttccgtctgatccgcaactactaccgtttcggttgggtgatcccgtatctgttcggcgcatcgccggccatttgttcttcgttcctcaaagggcgcgagaccactctgccgttcgaacgcaccgagcaggggatgtgctacctgccgtacgccacctcgctgcgtctgagcgacctgggttataccaacaagtcgcaaagtaatctgggcatcaccttcaacgatctgcacagctatgtggccggtttgaagcgggcgatcgttacgccttccgaagagttcgccaagctgggcgtgaaagagggtgatcgctacctgcagttgaacagcaacgtgctgcaaatcgagaacgagctgtatgcgccgatccggccgaagcgcgtgaccaaaagcggtgagacgccgtcagacgcgctgctgcgcggcggtatcgaatacatcgaagtgcgttcgctggatatcaacccgttctcgccgatcggcgtggatgcggtgcaggcgcgtttcctggatctgttcctggtgtggtgcgcgctggccgatgcgccggagatgagcagcgatgaactgctgtgcacgcgcaagaactggaaccgggtgattctggaagggcgcaaaccgggtcagaccatcggcatcggctgtggcgccagccatgaaccgctggaaaaagtgggcaaggcgctgttcgccgatctgcgtcgggtagcagaagtgttggacggcgaagccggcaaccgtcaataccagcaggtgtgcgatgagctggtcgccgcgtttgacgatcctgagctgactttctccgcgcgcattctgaaggcgatgaaggcggaaggcaccggacgcgtcggtctgcagctggcggagcagtatcgccagacattgctggaagaaccgttggaaatcctgaacgaagccgagctggataaagagcgggaagcctcttggcagcgtcaacgcgacatagaagccaatgatacgctaagctttgaagcgttcctgaagcaaaacggcggaagctgaaaaagaaaaaggccacatcaatgtggccaaatatgcatctctgatgacagggatgatgataacaaatgcgcgtctttcacatactcagactcgcagggttggaaaaggtttcccggttaggaaaaaaagtttcgaaataaatgctcttttacgaggaggtagcgaaatgccattgctggatagctttaccgtcgatcatacccgtatggcagccccggctgtccgcgttgcgaaaaccatgaaaacgcctcatggcgataccatcacggtatttgatctgcgcttttgccgcccgaacctggaagtgatgcccgaacgcggcattcacacgctggaacacctgttcgccggctttatgcgcgaccacctgaacggccagggcgtggagattatcgacatctccccaatgggctgtcgcaccggtttctacatgagcctgatcggcgtgccggaagagcagcgcgttgccgatgcctggaaagcggcgatggcagacgtgctgaaagtgaccgaccagcgcaagatccctgagctgaacgagtaccagtgtggtacctaccacatgcactcgctggaagaagcgcaggaaatcgccaagcacattctggataacggcgtggtggtgaaccacaacgacgaactggcgctgccgaaagagaagctgcaggagctgcatatctaaccgtacgtttcccgcagagacaaaaaagacgcgatttcgcgtcttttttacgttctggcggagggttagtgatggccgatgctggactgcagcgaggtgatcggcgtgacccgcacctgtttgatcatattgccctgcacgtcgagaatgtcgatatcgtaatggccgatacgcacccgggtgccgatttcgggtatctcttccagttcttccagcagcatgccgttgacggtgcgagcttcattggcgggtaaagtccagttaaaggccttgttcagctcccgcacgttggcggtaccgtcgatcaagaccgagccgtcgctctgcggcgtgacttcttccgccagcgtcggcgacattgaggtggtgaagtcgccgacgatctcctcgaggatgtcttccaccgtaaccaggccctgaatgtcgccgtactcgtcgaccacgatgccgaccttctctttgttgcgctggaacttcaccagctgcacgttgagcggcgtgccttccggtacgaagtagatctcatcggcggcgcgcagcaggttctctttgttgaactcttttttctcggtcatcaggcgataggcttcgcgcacgcgcagcatgccgatcgcgtcgtccagcgagctgcgatacagcacgatgcggccgtgcggcgaatgggtcagctggcgcatgatcgacttccagtcgtcgttgacgtcgatgccgacgatctcggtgcgcggcaccatgatgtcgttgaccgtcaccttttccaggtccagcaccgagatcagcatgtcctgattgcggcgggagatctgcgactgggattcacgcacgatggtgcgcagctcatccttgctgacggcgtcgctgatgcgcacgttggtgcggataccgaacaggcgcaaggtcaggctggtgatgccgttgagcagccagaccagcgggaacatcaccttttgcaacggggccagcaggacgctgctggggaaggcgatgcgttccggatagagcgcggcgaaggttttcggcagcacttcagcgaacagcagcacggcgaaggtcagcacgccggtcgcaatcgccacgccgagatcgccatacagccgcatgccgacgatggtcgccagcgccgaggcgaggatgttgaccaggttgttgccgatcagcaccaggccaatcagccgatccggtttttgcagcagcttctccacccggcgcgccgaacggttaccctgcttggacaggtggcgcaggcgataacggttgagcgtcatcatgccggtttcggaggcggagaagtaagcggagaccacgatcatgatcaccaggataatgatgagggtccccgtcgacacatgctccaatgcagtattccttatagagagggaaagttgaaccgggctggctcagcgcaccatcacctgttgaatcagacggctgccgaagtaggcgagcgtcagcaggaaggcgccggcgaagctgaaccagacgacgcggcggccgcgccagccttcatggtaatggccccacagcaacacgatatacacgaaccaggccatgatcgacaacacggctttatgcacgttctctttgctgaacagattatccatgtacagcaggccggtgcacagggtgagcgtcagcagcaccacgccgatctgggtgatatggaacatcttgcgctcgatgctcatcagcggcggcatgtcggcgctgaaggtcagctttttgtttttcaacaggtagtcgagccaggcgagctgtaaggcgtagagcgcggcgatgataagggtggcgtaagagaacagcgccaggccgatatgcaccatcaattccgggctggcttccaggtgagtgatgaactcgccgggcatgaagctggcgaaggccagattgatcatcgcgaaactgtagacgatcggcagcaggaaccagccgcgatcgcgtgaagcgacgaaggtcatcaccgaacagatgatcaggctgacgatagaaccaatgttcagcaggctgagattctgcccggcgctgacgtcaaagatgcgctgctgcagcgcgatggcgtggcaaatcaacgccaccaccgccgagacgagggcgagccgacggtatgcgctgttcttccgcaacaagctgggaatgatcagtccaaggctgagcaggtaggccatcaaagccacaatggagaaaactggcataacgtttaattttgcttcggcgtggttaattggagtgtcagtatagcgttgcgcgcgtttcactccaacctatctccaacgctgaggcagagatcctgcgcgcttcgtgttatcatcggcgcaattgtgtcgccggagcggcctgtcattacacgttgagcatgagacgatgtttgaaaatttaaccgatcgattgtcgcgcacgttgcgcaatatcagcggccgcgggcggctgaccgaagagaatatcaaggaaaccctgcgtgaagtgcgtatggcattgctggaagcggacgttgcgctgccggtggtgcgcgacttcatcaaccgcgtcaaagagagcgcggttggccatgaagtcaacaaaagcctgacgccggggcaggagttcgtcaagatcgtcaagggcgagctgatcgccgcgatgggcgaagtcaacaccgagctgaatctggcggcccagccgccggcggtggtgctgatggcgggcctgcagggggccggtaaaacgaccagcgtcggtaagctcggcaagttcctgaaagaaaaacagaagaagaaagtgttggtggtttccgcggacgtttatcgcccggcggcgatcaaacagctggaaaccttggcggaaggcgtcggcatcgacttcttcccgtctgacgtcaaagaaaaaccgatcgacatcgtcaatcgcgcgctgcaacaggccaagctgaagttctacgatgtccttattgtcgataccgccggccgcttgcacgttgacgaagcgatgatggacgagatcaaacaggtgcacgcggccatcaagccggtggaaaccctgttcgtggtcgacgccatgaccggccaggacgccgccaataccgccaaggcgtttaacgaagcgctgccgctgaccggcgtggtgctgaccaaggtcgacggcgatgcgcgcggcggtgccgcgttgtccatccgccatatcaccggcaagccgatcaagttcctcggcgtcggcgagaagaccgaagcgctggagccgttttacccggatcgcgtggcatcgcgcatcctgggcatgggcgacgtgctgtcgctgatcgaagatatcgaaagcaaggttgaccgcgagcaggcggagaagctggccaacaagctgaagaagggcgacggtttcgatctgaccgacttcctggagcagctcaagcagatgcgcaacatgggcggcatggccaatatgctgagcaagctgccgggcgccggccaactgccggacaacgtcaagtcgcagatggacgacaaagtgctggtgcgcatggaggcgatcatcaactcgatgacgctgaaagagcgcgccaaaccggaaatcatcaagggctcgcgcaagcgccgcatcgcgatgggggccggcatgcaggtgcaggacgtcaaccgcttgctgaagcagttcgacgaaatgcagcgtatgatgaagaagatgaaaaaaggcggtatggcgaagatgatgcgtggcatgaaaggtatgatgccgccgggcttcccaggccgctgacgggcctccgcacgccgagtgcgggcgctttcagcattcgccgttcgcggtgaaaaccgcccgaaatttgacaggctgcaaaagttgtcccctgcgatcgacgctttagattgctttttgcgccaaaatgagtaaaattttcgggctttttatattgcaaccgggccccgtccctcaatggggcccggctgttttattaactaaagaggatgttatggtaacaattcgtttggcacgtggcggcgctaaaaagcgtccgttctatcaagtagtagtgaccgacagccgcaacgctcgtgatggtcgtttcatcgagcgcgtaggcttcttcaacccgatcgcttccggtcaggctgaagcactgcgtctggacctggaccgcatcgagcactgggttggtctgggtgcaaccgtttctgatcgcgttcacgcgctgatcaaagacgctaagaaagcagcttaatctgtcgcggtggtggcaatgagcaagcaactcaaaccggtagcgcctaagcagccgattgtactcggtaaaatgggttccgcttacggcattcgtggttggctcagagtgttttcatccaccgagaacgccgaaagcatttttgactatcagccgtggtttatccagcaggcgggtcagtggcagcatatcgagttggaagactggaagcgccacagtcaggatctgatcatcaaagtcaaaggcattgacgatcgggacgcggcgaatctgctgactaatcgcgagattatggtggattccgatcaacttcctccgttggagggtgatgattactactggaaagacctgatgggctgccaggtagtcacctccgccggctacgagctgggtaaagtcatcgatatgatggaaaccggctcgaacgatgtgatggttgtgaaagcgaacctgaaagatgcgttcggcatgaaggagcggttgattccgtttcttcatgggcaggttatcaagaaagtcgatctcactgctcgcgtgattgaggcagattgggatcctggtttttgacccccggatcaaacggtcgaagcaagtggaataacggtaaggggattggcttgtgttcatcggtattgtaagcctgtttcctgagatgttccgcgctatcaccgattacggggtgactggccgggcagtaaaaaatggcctgctgagcgtgcagtgttggagtccgcgcgacttcacctacgaccggcatcgtaccgtggacgatcgcccttacggcggcggcccgggaatgctgatgatggtgcaacctttacgggaagccattcatgcggcgaaagcagcggcaggcgagggagcaaaggtgatttatctgtcacctcaggggcgcaagctggatcaaactggcgtgtgcgaactggcggccaatcagaagatgattctggtgtgcggccgttacgaagggatagacgagcgcgtaatccaaaccgaaattgacgaagaatggtcaatcggcgattacgttctcagcggcggggaactgccggcgatgaccctgattgattcagtcgcccgtttcataccgggtgtgctgggccatcaggcctcagcggaggaagactccttcgccgacggattgctggactgcccgcactatacccgccccgaggtgttggaagggatggaggtaccgccggttctgctgtcgggcaaccatgccgagatacgtcgctggcgcttaaagcagtcgctgggccgaacctggcttagaagacctgaacttctagaaagcctagctctgactgacgagcaagcggtgttgctggctgagttccaacgggaacatcaggccaggcaacaggactatgaaggaaacgtctgacatcagacgggaccgatatatcagtttacctagggtaagagacatattatgagcaacattattaagcaacttgaacaagagcagatgaaacaagacgtacctgcattccgtccgggtgattccgtggaagtgaaggtatgggtcgttgaaggtagcaaaaaacgtctgcaggcattcgagggcgtggttatcgctatccgtaaccgcggtctgcactctgcattcactgttcgtaagatttccaacggcgaaggtgttgagcgcgtattccagactcactccccagtaatcgacagcattactgttaaacgtcgtggtgccgttcgtaaagctaaactgtactacctgcgtgaacgtactggtaaggctgctcgtatcaaagagcgtctgaaccgcgttaactaacgctgcatccaaaagttaatagttatcaggggttggcctatgccaacccctttttttatcttaaaacctcgacatgttgcatttgcgagatttcgtctgcgcaccgccaacataataaagcctgcataagcaggctttttgcattacagcgctgcggcgctgtgtttctgctgactctccggcgggtgaggctgagccgggataatgtcatcgacaggtttgacgatcacccgcgcgacggactcgtgtgtggcgaatgtgcagctgcaattgatgttgcggcattgatggtaacgctctttggtcgactcgctcagatagcggctggagcgagtgtgggccacgtgaccgcatagtggacagtgcatcataagaacccccttgaacaaattaagtgaaattggtgtggcatcacctttggcgagcgaactcgtcatcatgaggcaatgccctgcaagcacagtgcgcgttccatggcgcgtcgctgttccagccctttgtttttctttccgtttacgtaaacccagcgtggcagctgatcgcaggcctgccgccactggcgctgttgcagcagcgcgactagcgtagagtggcaggctgcgctgacgcccacattgaaggcgaaggcgatcgccgcatcataggtttgttgcgagagcgtatccggcaggcaggcggccatgccgcgctcggtgcggcgaacatcgtcgaccaaatccatcgcggctttgtgttcatcaatcgctttaccagggatgacgccagcggtgtgcccaatgccctgcgtccacaccccggcgctgcactggtacggcgacaggcggcaaccttcgagatcggcgatcagcctgaggccggcttctgaggtttgcagctcgccaaatgacggcaacagcacggcgatggccaaaacggcggcgacgctgcagcgcttaacggttgcactcatcgtaaattttcctccgcgatgtcgcattgcgctcaatggccttcaagatctgcaggcttttacgtcggtagtaccagttcaccagaaacgtgccgatgcctaccgccgcaccgactaaaaaggcaatgtcctgcggagacagcttgccgagccaggcgagaaacagcgccatggcgtaggtgatgaatgaggttattttctccatagcattatgctcgcttcgtttacagaatctcgggagccggaggcatcaatgtgagacagcttgctatcgatatccatcatgctcctggtctgtatgataatcactgtatatgcatacagtattaagctatttgctaaagtcgtcaatgggtgaggtgaatatttttagcagattgtgcaaaagagggagggggcggcataaaaaaagcccatcgatgatgggcttcgagaaataatggggggagattacaggccgtagaccagcgtgaccgaggtggtggtatctgtgttcttcggcgctgaggccggcggtttgctgttgtaggtcacggtgtaagcaacgcgcaatgagaagcgatcgttgatcgccacgttcaacgcgctttccgagttcagcgtggtttcttcgttcgccagcgcggaaacgccctgaatgaacttggtgttgtcggtcaactgataggaatagttggccgcaccataggccagccccttggtcgagcggccgccgccatggtattcgtcatggcgcacgccgggaccgaattccacccgcaggtcactgagcggcccgttaaggagttgacggccgtagccgccggtcagcgtggagcgtgaatcgtaaccgttgaaacggtcactcagccagctggcctgaccgaacaggtagttgcgatcggtcaggttatagcgcgtacggccaccggcctggtatttttcggacgagcgcacgttggaggaggtggtgttgttggccgccccccacaggctgtacgccgcgtcgctgttgaaccaggtcatgttggtgttggccaacagggtggagctctgcgagttgcctgactgggcgttgtagcccgcctgcacgttgccttcgaacggtttcttggcggtggccggatcgtccatcgcggtgaaaagcgtattgtcggcaagggctgaaacactggtgaaagtcgttaagcagcaaatatacagcggaaaagcgcgacgagcgcgagaagagagcatcttggatccagttgttaaggggagttattgttgatgacggtcacattatatcggttcatttcggcgacaaaaatagccgccattagcttaagtttttaatttttatccctcatttattcgcttttcttctacttaaaatcatcgcttttggcggcatttcgtgctgatcctgcttcgcactggcgtcggtgccgagatcggcggcgtattttcgctgtaaaactagatgtacagatttatttacgaatgttcgtttttcttagaccgggtggctaatgtggggggacgggctttgtgatttattaatgtcatgtatttattgtgttttaattgttttttacaagcctttttcagatgtgatttaatcgggatgattacggtaattttttatttacgggaaatggattgaaaactttacatatcgtgatagggtagagccctgaaacgctcaatgttccatttcaacgcataacgccaaacgacaggaatagcatcatgcaaaaagacgcgctcaataacgtacacatcagtgcagaacaggttctcatcacgccggaggagctgaaaaaccagttcccgctcagcgccgacgacgaaaatgagatcgccactgcgcgcaacactatcgccaacattttgcaggggcgcgatcatcgcctgttggtggtgtgcgggccttgttcgatccacgatccggacgcggcgctggactatgcccgtcgtttgaaaaccctggcggctgacttgagcgatcagctgtatatcgttatgcgcgtctactttgaaaaacccagaaccactgtcggctggaaaggtttgatcaacgatccgtacatggacggttcgtttgacgttgaggcaggcttgcatatcgcgcgtcgcctgttgctggatctggtgggcatgggcttgccgttggctaccgaagcgttggatccgaacagcccgcagtacctgggggacttgttcagctggtcggcgatcggtgcgcgcaccaccgaatctcagacccaccgagaaatggcctccggcctgtcgatgccggtcggcttcaaaaacggcaccgacggcagcttgggtaccgccatcaacgccatgcgcgccgccgctatgccgcaccgcttcgtcggcatcaaccaggcaggccaggtttgcctgctgcagacgcagggcaacccggacggacacgtgatcctgcgcggcggcaaaacgccgaactacagtgctgagcacgtcgcggcctgtgaaaaacagatgcttgaggcgggactccacccgtccttgatgatagattgcagccatggaaactcgaataaagactatcgccgtcagccggcggtggccgagtccgtggtggagcagatcaaggcgggcaaccgctcaatcaccggcattatgctggagagccatctgcatgagggcaaccagtcttccgaacagccgcgtgcagacatgcgttacggtgtgtccgtcaccgacgcctgcatcaactgggagagcacggaaaccctgttgcgccatatgcatcaggaactcggcgctgcgctggcggcccgtacgggagaaaagtaagttatggtggcagaactgaccgcgctgcgcgatcaaatcgatgaggtggataaagcgctgctgggtctgctggcgaaacgcctgcatctggtagcggaagtgggcgaagtcaaaagccgtcatggcctgccggtttacgtaccggagcgcgaagccgcgatgctggcctcgcgtcgccaggaggcggaaaacctcggggtgccgccggatttgatcgaggacgttttgcgccgcgtgatgcgcgaatcctacgtcagcgagaacgataaaggctttaaaactttgtgtccgcagctgcggccgatcgtcatcatcggcggcaacggccagatgggaaggctgttcagccgcttgctgacgctgtcgggttatcaggtcagggtactggatcaggaagattggccgcaggcggaacagctgctggcagacgccggcatggtgatcgtcagcgtgccgatccacgtgaccgagcaggtgataagccgcctgccgacgctgcctgccgactgtattctggtggatttggcgtcggtgaagaaccgcccgctgcatgcgatgttggcggcgcacagtggcccagtggtagggctgcacccgatgttcggcccggacgtgggcagcgtggcgaagcaggtggtggtttactgcgacggccgccagccggaggcttaccagtggctgcttgaacagctgcaggtgtggggcgcgcggctgcatcgcatcagcgcggtcgaacacgatcagaacatggcgtttattcaggcgctgcgccacttcgccaccttcgcctacgggttgcatctggcggaagagaacgtgcaactggagcagttgctggcgctctcctcgccgatctaccggctggagctggcgatggttggccgcctgtttgcgcaggatccgcagctttacgccgatatcatcatgtcgtcggaggaaaacgtggcgctgattaaacgttactaccagcgcttcggcgaggcgataacgctgttggagcatggcgacaaacaggcgtttatcgacagtttccgcaaggtggagcactggttcggcgattacgcccaacgcttcctggtggagagccgcacgctgttgcggcaggctaacgacagccggcagtaaaacgcgggcggtaaacgtaaaaggttcggcttggccgaacctttttttatggtttcaggatgggttgaccggcaccacggtgtcgctcgggtagcagcccaggaccttcagcgagcgggtgattggcgccagatcgcgcagcgctttttgcatcgcgtcggcacgcagattggcctgcacatcgatataaaacatctcttcccacggattgccgttgatcgggcgtgattccagtttggtcatgatgatgccgttgtcgcgcagaaccagcagcgcttcgaccagcgcgccggattgttggccggtcgccatgatcagcgtggttttggccggcacctgttcagatacgtcgatcgctttgcgcgccaggacgatgaagcgagtgatgttctgctgctggttggcgaggttgtgttccagcacctgcagcccgtacaacgcgccgccggcctcactgcccagcgccgccaccttcggcgaattcagcttggcgactttctccatcgccgcggcggtgctttcggtgtactcgattttccagtgcgggaagcggttaaggaactggctgcactgttggaacggctgcgggtggctgtagacggtttcaatctggcccaggtcgctgtcgccggccaccagaacacagtggtcgatcgggttggtcagttcgccgacgatcgacaggctggtgtgttgcagcagatcgtacacttcgttaatcgagccggagctggtgttctcgatcggcagaatggcatagtccgcctggccggtttccacctgggcgaagatatcctgaaacttttggcagccgcattcgatcagccgatcgaaatggcgggcagcgtattggcgtgccgccagatgcgaataagagcctttcgggccgagaaaggcgatgcgggcggagtgttggctgacggggttgagctggtgctgcagcagcgcctgctgggtcagtacggaatcttcgataatcagttgaaacagacgggtgacgtagaagccgtccaggtcgtaaggtttggcggcggcgatcagcgcatccagcagatcgcgttcgcgctctttgtcgcggatcgggcggtgagagtgcagcttggtcttgccgacttcgatcgccagctcacggcgttccgccagcagggccaacagtttcaagtccagtgcgctgatgcgctcgcgcagcaccaataacgggttgtcagtcataatcagcttccgccttctgttcttattcgttgtaaaacagccataaaaaaagccccctgtctccaggaggccttgttgttcgtcttcgcattctttctcacacgacgaaacgcctcccagtcaggggaaggtaaaaaagaatgcgaagaaaaacggtgtgcgtggcatggtctacctaaggttaatgtgaacaggttttaaagtaaccgctggcctttagcccgtcaacaaaaatacccgacaaaaaacgcgccctcgggcgcgtttgatgcggcaatcgctgtcggacggttattcctgctcttgcgtgacttccggcacgatgtctttcacgctggcgttgcagcggcgcgcttcgcctttgtgctgcactttgttcagctggcgctccagcttggcgatcagctcattaacggcggtatacatgtcatcatgtttggcgctggcgaccagcgggccgttaggcgtggtaatggtagcatcggcgacaaacccctgcggttctttggataagacgatatgcgggttaatcagctgggtctgccatttttccagtttggtgagacggtcttcgacgtgattgcggattgcgggagtgatatccatttgtttgctggtaatgttcaatgtcatataacttacctctctgtctttccgtcttggtgaatccagcataccccgctttttgtttaaatgcgtgatgtaaatcacgattttttgtcactttttgcaaagttagttcaatctgtgattcagcatttgaattggctatctaatgcttgagagttgccgccggatggcgcattatcgatgagttgaccggtgaggagtactagctaacaccgtgtttttacttgtgtatttttccagtgaaaaccaggtcgacgccaatgaaaacggcagcctcggctgccgtttggtttttctgccgttgccgacgcgcgcttattgcgggttggcggcgatcactttggccactttgtcagcctggccgttcagctgcagctgcttgtaggcattttccatcagcggcaacacgtcgtgcgtcgctttggtatccgggaattcacgcaacatctgctcggcgcgattaacgaccgcgacgtaagcaccgcgtttagtgtagtattccgccaccgaaagctcatgcttggccaaacggtctttcagatacaccaaacgcttgttggcgtcggtcgcgtattggctgttcgggtattgctgaatcaactggctgaagtcgcggaacgcagcgcgagcgtgctgaggatcgcggtccgaacggtcaaccccgaagaagccctgcagcgcgctgtcatcgagcgccatgtcggtcaggccgcgcatgtacatcacgtaatcgatgttcgggtgcgtcgggttcagacgcatgaagcgatcgatggatgcctgagccatcggcaagtcggcggccttatagtaggcgtaaatcaaatccagctggacctgctgggaatacggcccgaaaggatagcggttatctaacgcttcgagttgcgtaatcgcgcccttgaagttaccgtcctgcagtttttgctgcgcggtagcatagatttccgaaggtgggttgtcgggaaccgcatccttggatgtggagcaacctgccagcgccaggctcaacgtggctgccgccaccagatatttcatacgcgtcatgacgttttgattatcctcagggtgttattccgggagactgtccgttaagctcccgacaaagaccaggtacaatagcacattatattaaacggcatcgccgtgaaaacccaacgttaacgaagaagctgcatatggcacaacaagtacaactcaccgcaacggtggccgaatctcaactcggacaacgtttagatcaggctttggccgaattgttccctgattattcacgatctcgcataaaagagtggatcctgggcgatcgggtgaaggtcaatggcaaaacgtcaaacaaaccgaaagagaaggtgctgggcggagagaccgtcgccatcgatgcacagattgaagaagaggcgcgttgggaaccacaggatatcgcgctggatatcgtctatgaagacagcgacatcctggtgattaacaaaccgcgcgatttggtggtgcaccctggcgccggtaacccggacggcacggtgctcaatgcgctgctgcatcactacccggaaattgccgacgtgccgcgtgccggcatcgtgcaccgtctggacaaagacaccaccggcctgatggtggtggcgaaaaccgtgccggcgcaaacccggctggtggaagcgctgcaggcgcgtgagatcacccgtgaatacgaagcggtggcgatcggcaccatgaccgccggcggcacggtagaagagcctatcgcgcgtcattccaccaagcgtacccatatggcggtgcacccgatgggtaaaccggcggtaacgcactaccgcatcatggaacacttccgcgcgcacacccgcctgcgcctgcgcctggaaaccggccgtactcaccagatccgcgtgcacatggcttacatcagccatccgctggtgggcgatccgctgtacggcggccgtccgcgtccaccaaagggcgcttcggaagccttcatcaacacgctgcgcggctttgaccgccaggcgctgcacgccaccatgctgcgtttgtatcatccgatcagcggcatccagatggagtggcatgcgccgctgccgcaggacatggtcgatctgatcaacgcgctgaaggcggacaccgaagaattcaaagatcagatggactggtaatgagctcgctcattctgcctgactggccgttgcctaccggggttaaggcctgcagcaccacgcgtggcggcggcgttagcctgccgccttatgactcgttgaacctcggcacccacgtcggtgatgaggcgcaagcggtgacacgcaatcgggaacgtttggttaccgccgccggtttgccgcagatgccggtgtggctcgagcaggtgcacggcactcgcgtggtgacgttgacggggaaagcgcccgccgatctgcgggcggatgcggtgtacagcaatgtgccggggcaggtgtgcgccgtgatgacggcggattgtctgccggtgctattctgctcgcagcacggtgacgaagtggctgccgcccacgccggctggcgcgggttatgccacggtgtgctggagcaaaccgtggcggcgttcagcgccgcgccgggtcagatcagcgcctggttggggccggcgatcggcccacagcagtttgaggtcgggccggaagtgcgcgccgctttcatggcggaagacgccgaagccgcggcggcgtttacgccgcacggcgataagtttttggctaatatctatttgctggctcgccaacgtttgttgcgagcgggcgtgcaggccatctatggcggcgaccgctgtacggttaacgaaacgagtcattttttctcctatcggcgcgatggaataaccggacgtatggcaagtttaatctggctgatataacctattgaattaggacgatccaacgacgcatggcgttgtaccgaaaatttagcgtcgagataaccttgaaaatttgagggatgacctcatttaatctccagtagcaatttcgacccatcttggaggtgttatgcgtctggatcgtcttactaacaaattccagcttgccctcgccgatgcccagtcactagcccttgggcacgacaaccagtttattgaaccgctacatctgatgagcgccctgctcaatcaggaagggggcacggttcgtccactattaacttccgcaggtatcgatgccgggcgcgtgcgcaccgaaatcgaacaggcgctgtcccgtttaccgcaggtagaaggcaccggtggcgacgttcaaccgtcccacgagctggtgcgcgtcctgaacctgtgcgacaagctggcgcagaagcgcgcggataaattcatttcttccgagctgtttgtgcttgcggtgctggaagaccgcggctcgttgaccgacttgttgaaagcggccggcgcaacggccgacaaaatcagcaaagccattgaacaaatgagaggcggtgacagcgtggaagaccaaggcgccgaagaccaacggcaagcattgaagaaatataccatcgatctgaccgaacgtgccgagcagggcaaacttgacccggtgattggccgtgacgaagagatccgccgcaccattcaggtgctgcaacgccgcaccaaaaacaacccggtacttatcggcgaacctggcgtgggtaaaaccgctatcgtcgaaggcctggcgcagcgcatcatcaacggcgaagtgccggaagggttgaagcacaagcgcgtattgtccctcgatatgggcgctttgatcgccggcgccaaatatcgcggcgagtttgaagagcgtctgaaaggcgtgctcaacgatctggccaagcaggaaggcagcgtgatcctgtttatcgacgaactgcacaccatggtcggcgccggtaaggcggatggcgcaatggatgcgggcaacatgctcaaaccggcgctggcgcgcggcgagctgcactgcgtcggtgccaccacgctggatgagtatcgtcaatatatagagaaggatgcggccctcgaacgtcgtttccagaaagtgtatgtggcggagccgagcgtggaagacactatcgctattctgcgcggcctgaaagagcgttacgaactgcaccaccacgtgcagatcaccgatccggccatcgtggcggcggcaacgctttcgcaccgttatatcgccgatcgtcaattgccggacaaggctattgacctgatcgacgaagcggcgtccagcattcgcatgcagatggactccaagcctgaatcgctcgacaggcttgagcgccgcatcattcagttgaagctggaacagcaggcgctgaataaagagtcggacgacgccagtaagaaacgcctggaaatgctcagcgatgagctggggcagaaagaacgcgaatattcggagctggaagaagagtggaaagcggaaaaagcgtcactctccggtactcagaacatcaaggcggaactcgagcaggccaaaatcaccctggagcaggcgcgccgcgtcggcgatttggggcggatgtcggaactgcagtacggcaagatccctgagctggagaaacagctcgccgctgccacgcaggccgaaggcaagagcatgaagctgctgcgcaaccgggtaaccgatgcggagattgccgaagtgctggcgcgcgcgaccgggatcccggtggccagaatgctggaaggcgagcgcgacaagctgctgcgcctggagcaagagctgcattcgcgggtgatcggccaggacgaagcggtcagcgcggtctctaatgctatccgccgcagccgcgccgggttgtccgatcctaaccggccgatcggttcgttcctgttccttggcccgaccggggtggggaaaaccgagctttgcaaggcgctggcttcgttcctgttcgacagcgacgacgccatggtgcgtatcgacatgtccgagtttatggagaaacactccgtttctcgtctggtcggcgcgcctccgggctatgtcggttatgaagagggcggctacctgacggaagccgtacgtcgtcggccttattcggtgatcctgctggatgaagtcgagaaagcgcacccagacgtgtttaacatcctgctgcaggtgttggatgacggccgcctgaccgatggccagggccgtaccgtcgatttccgcaataccgtggtgatcatgacgtccaacctgggttcggatctgatccaggagcatttcggtcagatgaactacgcgcagatgaaagagtcggtgatggagatggtgagtcaccacttccgtccggaattcatcaaccgtatcgatgaagtggtggtgttccatccgctgggcgagaaacacattgctgcgatcgccaagattcagctgtcgcgtctgtacaagcgtttggaagagcgcggttacgaagtaaccatgaccgagcctgctctggcattgttgagcaaaaccggttacgaccctgtgtatggtgcgcgtccgttgaaacgcgctattcagcaggagatcgagaacccgttggcgcagcaaatcctgtccggcaagctgatccccggcaagctggtgacgctggatgtggaaaacgaccatatcgttgcacgccaataacggcaattaagcctattaaagatgaaagggagcgggtgaccgctccctttttttatcttcttctttatctttgtttgtccctatttacagaggttgccgctattactgtgctaaaaccggtgtttttcgactaataaatatcctaaaaaggcgtttttggtgattatttgagcgcttgaaaagttttttgcaattaggggttgcggctcgccgagaactccctataatgcgcctccactgaccgggaacaacgactgacaagccgccgggtcagcgagaagaaagcgaaataaacgcttgactctccgggcgaaaagcgtagtatacgcagcccgcgccgatgaagtttctcggcactgctctttaacaatttatcagacaatctgtgtgggcactccacaagacgatatccagcatcttcggatgcaaaaaatatcaagtcttgaagagtgactaactgaagtaaaattcatgcagtaaatctttgagcatcgcttctcgagtggaagcaaatcaagcttttaattgaagagtttgatcatggctcagattgaacgctggcggcaggcttaacacatgcaagtcgagcggtagcacaggggagcttgctccctgggtgacgagcggcggacgggtgagtaatgtctgggaaactgcctgatggagggggataactactggaaacggtagctaataccgcataacgtcgcaagaccaaagagggggaccttcgggcctcttgccatcagatgtgcccagatgggattagctagtaggtggggtaatggctcacctaggcgacgatccctagctggtctgagaggatgaccagccacactggaactgagacacggtccagactcctacgggaggcagcagtggggaatattgcacaatgggcgcaagcctgatgcagccatgccgcgtgtgtgaagaaggccttcgggttgtaaagcactttcagcgaggaggaaggtggtgaacttaatacgttcatcaattgacgttactcgcagaagaagcaccggctaactccgtgccagcagccgcggtaatacggagggtgcaagcgttaatcggaattactgggcgtaaagcgcacgcaggcggtttgttaagtcagatgtgaaatccccgggctcaacctgggaactgcatttgaaactggcaagctagagtctcgtagaggggggtagaattccaggtgtagcggtgaaatgcgtagagatctggaggaataccggtggcgaaggcggccccctggacgaagactgacgctcaggtgcgaaagcgtggggagcaaacaggattagataccctggtagtccacgctgtaaacgatgtcgatttggaggttgtgcccttgaggcgtggcttccggagctaacgcgttaaatcgaccgcctggggagtacggccgcaaggttaaaactcaaatgaattgacgggggcccgcacaagcggtggagcatgtggtttaattcgatgcaacgcgaagaaccttacctactcttgacatccagagaacttagcagagatgctttggtgccttcgggaactctgagacaggtgctgcatggctgtcgtcagctcgtgttgtgaaatgttgggttaagtcccgcaacgagcgcaacccttatcctttgttgccagcggttcggccgggaactcaaaggagactgccagtgataaactggaggaaggtggggatgacgtcaagtcatcatggcccttacgagtagggctacacacgtgctacaatggcgtatacaaagagaagcgacctcgcgagagcaagcggacctcataaagtacgtcgtagtccggattggagtctgcaactcgactccatgaagtcggaatcgctagtaatcgtagatcagaatgctacggtgaatacgttcccgggccttgtacacaccgcccgtcacaccatgggagtgggttgcaaaagaagtaggtagcttaaccttcgggagggcgcttaccactttgtgattcatgactggggtgaagtcgtaacaaggtaaccgtaggggaacctgcggttggatcacctccttacctaaagatattagttcgcgtggcgtgctcacacagattgtctgatgaaaaagtaacgagcaaaagcgtcataaaagtacggtgtcgtgtccccttcgtctagaggcctaggacaccgccctttcacggcggtaacaggggttcgaatcccctaggggacgccaagcttccgacccacccggtgaaagcggcggtcttcagtatctgacgatacaccatatcttaaagatgacttccgagtcatgtttaagatattgctctttaacaatctggaacaagctgaaaattgaaacatgacggctgaaatttgtccctccgtagaagtactgggataaagagtaacctgtcatagagtctctcaaatgtttgcagcacgaacgatggaaacatcttcgggttgtgaggttaagtgactaagcgtacacggtggatgcctaggcagtcagaggcgatgaagggcgtgctaatctgcgaaaagcgtcggtaaggtgatatgaaccgttataaccggcgatacccgaatggggaaacccagtgtgtttcgacacactatcatgtcatgaatacatagtggcatgaggcgaaccgggggaactgaaacatctaagtaccccgaggaaaagaaatcaaccgagattcccccagtagcggcgagcgaacggggaggagcccagaacctgaatcggcttgtgtgttagtggaagcgtctggaaagtcgcgcagtaaagggtgatagccccgtacactaaaatgcacaggtcgtgagttcgatgagtagggcgggacacgtgacatcctgtctgaatatggggggaccatcctccaaggctaaatactcctgactgaccgatagtgaaccagtaccgtgagggaaaggcgaaaagaaccccggcgaggggagtgaaatagaacctgaaaccgtgtacgtacaagcagtgggagcaccttcgtggtgtgactgcgtaccttttgtataatgggtcagcgacttatattttgtagcaaggttaaccgtataggggagccgtagggaaaccgagtcttaactgggcgattagttgcaaggtatagacccgaaacccggtgatctagccatgggcaggttgaaggttgggtaacactaactggaggaccgaaccgactaatgttgaaaaattagcggatgacttgtggctgggggtgaaaggccaatcaaaccgggagatagctggttctccccgaaagctatttaggtagcgcctcgtgaactcatcttcgggggtagagcactgtttcggctagggggccatcccggcttaccaaaccgatgcaaactccgaataccgaagaatgttatcacgggagacacacggcgggtgctaacgtccgtcgtgaagagggaaacaacccagaccgccagctaaggtcccaaagtcatggttaagtgggaaacgatgtgggaaggcatagacagccaggatgttggcttagaagcagccatcatttaaagaaagcgtaatagctcactggtcgagtcggcctgcgcggaagatgtaacggggctaaaccatgcaccgaagctgcggcagcgacgcttaggcgttgttgggtaggggagcgttctgtaagccgttgaaggtggcctgtgagggttgctggaggtatcagaagtgcgaatgctgacataagtaacgataaagcgggtgaaaagcccgctcgccggaagaccaagggttcctgtccaacgttaatcggggcagggtgagtcgacccctaaggcgaggctgaaaagcgtagtcgatgggaaacaggttaatattcctgtacttggtgttactgcgaaggggggacggagaaggctaggctggccgggcgacggttgtcccggtttaagcgtgtagggggtgtgacctggtaaatccggttgcatattaaccctgaggcgtgatgacgatgcactacggtgcagaagtagttgatgccctgcttccaggaaaatcctctaagctccaggtaacattaaatcgtaccccaaaccgacacaggtggtcaggtagagaataccaaggcgcttgagagaactcgggtgaaggaactaggcaaaatggtgccgtaacttcgggagaaggcacgctggcatgtaggtgaagtccctcgcggatggagctgaagccagtcgaagataccagctggctgcaactgtttaataaaaacacagcactgtgcaaacacgaaagtggacgtatacggtgtgacgcctgcccggtgctggaaggttaattgatggggtcagccgcaaggcgaagctcttgatcgaagccccagtaaacggcggccgtaactataacggtcctaaggtagcgaaattccttgtcgggtaagttccgacctgcacgaatggcgtaatgatggccaggctgtctccacccgagactcagtgaaattgaactcgctgtgaagatgcagtgtacccgcggcaagacggaaagaccccgtgaacctttactatagcttgacactgaacattgagccttgatgtgtaggataggtgggaggctttgaagcgtggacgccagtctgcgtggagccatccttgaaataccaccctttaatgtttgatgttctaactcggccccgtgatccggggtgaggacagtgtctggtgggtagtttgactggggcggtctcctcccaaagagtaacggaggagcacgaaggttagctaatcacggtcggacatcgtgaggttagtgcaaaggcataagctagcttgactgcgagagtgacggctcgagcaggtacgaaagtaggtcttagtgatccggtggttctgaatggaagggccatcgctcaacggataaaaggtactccggggataacaggctgataccgcccaagagttcatatcgacggcggtgtttggcacctcgatgtcggctcatcacatcctggggctgaagtaggtcccaagggtatggctgttcgccatttaaagtggtacgcgagctgggtttagaacgtcgtgagacagttcggtccctatctgccgtgggcgttggaagattgagaggggttgctcctagtacgagaggaccggagtgaacgcaccgctggtgttcgggttgtcatgccaatggcattgcccggtagctaagtgcggaaaagataagcgctgaaagcatctaagcgcgaaacttgcctcaagatgagtcttccctgggcctttaaggcccctgaaggaacgtttaagactaagacgttgataggctgggtgtgtaagtgcagcgatgcattgagctaaccagtactaatgatccgtgaggcttaaccttacaacaccgaaggtgttttggtgagaccaagacaatattcagcttgtttacagattggattgacaggcttcagcgatgaagcgggttgattaaaacgaatttgcctggcggcaatagcgcggtggtcccacctgaccccatgccgaactcagaagtgaaacgccgtagcgccgatggtagtgtggggtctccccatgcgagagtaggacactgccaggcatcaaataaacgttatcagtgtgacgactggtaatgcgcaagtcgcagagcgcgatattgccggtatcgaaagatacaacgtaaaagaatcggtggagcggtagttcagttggttagaatacctgcctgtcacgcagggggtcgcgggttcgagccccgtccgttccgccacttaattgataagccctgagtttcgactcagggctttttcatatctgtattttgcgcttttcagtctggaattgttcctctttaccgcctcgcctttctccatattattgcctttagatcaaaagtcttatgccgaactaggcgtttttgatcaataaaaaagttgccataatcttcctcataccacatctacctgttaatgagagaaaacattatgagcatccctgcatttggtttaggtactttccgccttcaggatcaggttgttatcgattctgtcagcactgcacttgagctgggctatcgcactatcgacaccgcgcagatctatgaaaacgaagcggctgttggccaggctatcgctgccagcggcgtgaaacgtgaagacctgttcatcaccaccaagatttggatcgcgaatctggcgaaaggcacactgatcccaagcctgcaagaaagcttgaaaaaactgcaaacctcctacgttgatctgacactgatccactggccgtcacccaacgacgaagtgccagttgccgaatttatggctgagttgctggaagcgaaaaagctggggctgactcgccaaattggcgtatctaacttcaccatcgacttgatgcagcaagcgattgacgcgattggcgccgatgaaatcgccaccaaccaaatcgagctgtcaccgttcttgcagaaccgcaaggtggtagaattcgcgcagcagcacggcatcgccatcacctcttacatgacgttggcctatggcaaagcgctgcaggatgaaacgattaaaagcatcgccgctcgtcacaatgcaactccagcacaggttgtcctggcttgggcattgaagctgggttatgcagttattccttcctcgaccaaacgtgaaaacctggcgagcaacctgttggcacagcaactgacgctgaccgacgaagatatggcgcagatcgccgcactggagtgcaacggccgtctggttagcccggaaggcctggcgccaaactgggattaatctttcctcgcagtggtcagcataaggcgtccatcagggcgcctttttatcgtttcaggtattcactcacaaaatcaataaagctgcgcagacggttgctgacggcgctgtcgctgtaataaaccgcgttgatcggcatggcgaccggcagtgtcgcttccaccagaatcggaaccaaatctccacgtttgatatcttcgtcactcataaagtccgacaggcaggcgataccgttgccatgcagacagagatggcgctgggtttctccactattagtggtcaagccgggagtgatttccaactggctgccatctgaacaagccagtggccagcggttcaaactgggcaggtcgttgaagccgatgcagcagtgatgtgcaagatcttctaccgttagcggcgtgccgtgctgagccagataggcgggggaggcgagcacatgccggtagctggtcatcagtttgcgcgctttcagcgtggaatcggtcagctctcctacgcggatcgcaatatccacttttcgctcgatcaaattgataaagttttccgaagacactagcgataacgacatttcaggataacgttcgcggaactccgccactaaaggcgtcagcatgtgtagcaccaccggcgttgccgcgtcgacgcgcagcaggccttgcgggcgttgacggctttccatcagcgcattttctgccgcggccatatcgttcagtaccttctgcacctggcgaaagtaattctctccttcctgagtcaggctgatttggcgcgtggtgcggttgagcagcgttacgcccagtttgctttccagttttttcaccgttcggctaaccacggaattcgcttgttccaggcgttcagccgcccggctgaaactgccgctttccacgacggtgacaaaggtgatcagctcgtctgagtttgctttcatttttgctccaatggcaaagttaatttgaaattttgagcatttttatcatttaagcataggccgataatagccgtcatcaacttgaatgctatttcggagtaaaaaatgccactcgcattacttgccttaaccatcagcgcttttgctatcggcacgaccgagttcgtgattgtcgggttgattccgactatcgcggagcagttgggagtgaccgtaccgtccgctgggttgctggtgactatctatgccctcggcgtggccatcggcgcgccggtgctgacggccctgaccagccgcataccgcgcaaactgttgctggttggcctgatggtgctgttcactctcggcaacctgctggcctggcagtcacccagttatgaatcgctggtagtggctcggttgttgaccggcctggcgcacggcgtgttcttctctatcggttccactatcgccactagcctggtggcgaaagagaaggcggcctccgccatcgccatcatgtttggtggcctgacggtggcgctggtgaccggcgtaccgctggggacgttcatcggccagcagtttggctggcgtgagaccttcctggccgtttctctgattggcgctgtcgccacactggccagcattattttggtgccgagcaatatcaagaaccagggcagcgccggcgtgcgggaacagctgaaagtgctgactcatcctcgtctgctgctgatttacgcgattaccgcattgggatacggcggggtcttcacgacctttaccttccttgcgccgatgatgcaggaactggccggcttctctgctccgaccgtgagctggatactgttggcttatggcgtcgcggtggcggtgggtaacatctggggaggcaagctggccgatcgtcatggggccgtgcgtgcgttgagctttatctttgccgcgctggccgttttgttgctggtgttccagtttaccgccagccacagtattgccgctttgctgacggtgattgtgatgggcgtgttcgctttcggcaacgtgccggggctgcaggtgtatgtggtgcagaaagccgcgcaatacacgccaaatgcggtggatgtggcgtccggtctcaacatcgcggcgttcaacatcggcattgcgctcggctcggtgataggcggccagactgttgcttcactggggctggcgcagaccccctggattggcgcgctgatcgtggtggttgcattgttgctggttagcctcagtggccgcctggataaaaagtctcagctgcaaacggcttaattcgtaaaacccttgctgcctggcccgcgttttgcgggccttttcgcatttttcacctattacccctcacctttacacagctataccgtcagaagattgaaatcgctgcaggcggcccctataactgaaaaggtgatgcccgcaaaagccatgccctctatgcagggtaggcgtataatcaattcatcgttggcgagtgttcatcgccagttttcatgttaatgggtaataggcgaatcgcgtgccgaaacgaacttatgcaatgaggtatgttgcaggtcagccagttgagcgaatctttcctggcgccgttaaccagccgttgccgccaggggcggcgctgccgacgaccggcgccttgcgcgttatggtgtggaatattttcaaacagcagcgagccgactggctttcggtgctgaaaaaccatggcaaagacgcgcagctggtattgttgcaagaggcgcaaaccacgccagagttggtgagctacgctaccgccaactatctggcggccgatcaggtgccggcctttgtgctaccgcagcacccttccggcgtgatgacgctggcggccgctcatcctgtttactgttgcccgctgcgcgagcgagagccgctgctgcggctgtccaagtcggccctgatcaccgtttatccgctgtacaacggcgagctgttgatggtggtgaacatccatgcggtgaactttagcctgggcgtcgacgtctacagcaagcagttggggccgataggcgaacagatcgccagtcaccgggggccggtgattatggcgggggatttcaacgcctggagccgcaagcgcatcaatgcgctgtatgactttgccggagagatggcgctgcgcgaggtgagcttcaccgacgaccatcgccgcaaggccttcgggcgtccactggatttcgtattttaccgcaatctgggggtggtggaggcgtcggtgctggtgaccagcgcgtcggatcacaacccgctgttggtggagtttcatccggagaaagactcaccggtatggtgaatcgcagctaataaaaaagcaccccgaagggtgcttttttgtgccgaacacttaagtatccggcgttagcttgttgccgacaaacagggtcagcttcagacctggctgcaggttgcctttggcgagcgttgaattccaacgcatcacgtcgttaatatcgacgccgtgacgacgtgcgatactggcgagcgaatcacctttacgaacctggtaggtgatactgctgttactgccagtattgctggccacttgcagggtttgcccaacttttatggcgctcttggcgcgtaagttgttccaactctgcaaatcgctggtcttaacgttcagccgcttggcaatgcccgataaggtgtcgccggagcgcactttatacgaactgccaccggtcaaaccgctgttcttcgccaactgcgtcgttggctgagtcacggcgatctggccatcggccagcgagtctttcagttgctcggcatgtcctttgggaaccatgatgtaatggggcccgttgggtgccgtaacgccttttttgtagcctgggttatacgctttcatcttggtgactgaaagccctgccatctcagccgcctgagtcagctggatctgctgtccgacatcgatacgcgccagcgcacgggtttcatccgttttcgggagtttcacgccgtacttcttgctgttcttgatgatgtcgctcagcgccagcattttcgggacatagattgacgtttcacgcggaagcgacaatgcccagaaattggttggcttaccctggcgtttgtttgccttcaccgcttgcatcacgcggccttcaccactgttataggcggctacggtcagtaaccagtcgccgttaaacatgcggttcaagcgctgcatcatgttaagcgcagcggttgtcgaggcgacgacatcgcgtcggccgtcataccactgattgtttttcaaaccataattgcgacccgtttgcggcacgatttgccatagccctgcggcgttggcacttgacgtggcgtgtgggtcaaaagcgctctccactatgggtagcagtaccagttccatcggcatattacgtttcttaatctgcccgactatccagtacatgtacggctctgcccgtaatgttacatcgtggagatagctcttactttttaagtactttcttttctgatcacggatccgggaattttccggaacctccatcttcagctcgtcgctaatgaagttccacaggtcctgttgcgcggcgggactgttgttatccaaccaccgcgccgagctcgctcggccatttgctgtgtactctcctgcttcaccatcttgaccagccgaagacaaactctgtgcatgctgttctggcgccggtgcgtcctgcctggacgactggcaacccactagcaagactgaggcgagaaatatcgctttagccttcatgtgtgtgtcaatgtagttgcttaaaagacgagcaataatactttgcttcgccaaataacacaactaaaagcttagaagttatctttccgcaggcgtaattcggaaaaaactgaatgaaggcttttcggtggtgaattaaagcctaatttcttttgtaaatcagtgtcatggcaacgtaaaaacaggttaattttgcgctctaattgcaatgtagtcggcacgctggcttggccttttgcccttaacgcttcaacatgttgttgatatgtttcaatctctcgatcttccggcaaaatagcccgcgcaaacttaagatttgaaagagtatattcatgcgcgcagcaaattaaggtgttatcgggaagttgcgcgagttgttgaaatgagtcgtacatttgtttggcggtgccttcaaacagcctgccgcagccggcggagaaaatggtgtcgccgcagaacagataaggggcactatagaatgccacatggcccagcgtatggccgggaacggcgatagtcctgtattgacggccatcgatatcaaaggtgtcgccgtcatggacgatgtggttggcgcctttgtccgcggtttcctgcggcccatagacggccaggccggggtactgcgcgacaatctgcgccacgccgccgacgtgatcgtgatgatggtgagtcagcaggatcgccgccggcgccagctgcaggcgctgcaacgcttcaagtaccggctgcgcttcacccggatcgacgataatgcagcgcccctgtcggtcatccaataaccaaatgtaattgtcctggaaggcgggaatgctgataagattcatggtgtacctctcgttggcaacggcttgaaagaagataataaatcatgaaaccagcccatactctacaaaagctcaccggcccgcagtcctgggctgagctgccgtggggggagtactatcgtgaagcgctcgagcggcagttgcaaccctggtggcccaagctgttcggtttccatctgctgaagatgggcatgctcagcgccgagctggccacggataaatgcgcaatctcccatcaggttaacgtagggttggagggggaagggctgcaggtggtcgccgacgcttatcaactgccgtttgccgccaagtcggtagatgcctgcctgttggcacatacgctgtcctatgcggacgatccgcaccgcatgctgcgtgaggtggacagggtgttgatcgacgacggctggttggtcatcagcagtttcaatccgttcagcctgctggggttgggcaagctggcgcccgggttgcgtcgtcgccagccctatgtcagccgcatgtttacccagatgcggctgctggattggctcagcctgctgaattacgaggtgttgcaccaggcgcgttttcacgtactgccgtggcaccgcaagggcggcaaatttttatgcacccatttgccggcgctgggctgcatgagcgtgattgtggcgcgtaagcgcaccttgccgctgacgcccacgccgatgaaactgggggcgagaaagccgtctctcagccgcgcggtgggcgcgaccaagagctatcgcaagctgccttaggcttccggttggtaaccgacgtcttcctgcgtcggtttaccggccgcttcgcgcgccagcacgtcacaacgttcgttctccggatggccggcgtggcccttgacccattcccacttcacctcgtggcgctgaatggcctgatccagccgctgccacagatcgacatttttgaccggttttttgtcggcggttttccaaccgcgtttcttccagttatggatccagctggtgatgccctggcgcacgtactggctgtcggtgctgagcgtcacggcgcagggcacggtcagcgcttccagcgccacgatcgccgccatcatttccatgcggttattggtggtcagacggaatccttcgctgaaggttttttccgtctgcttatagcgtagtatcgcgccgtagccaccggggccggggttgccaaggcaggagccgtcggtgaaaatttctacctgtttgagcatctctggtagactcttcctatcagttttataaaagccaagtctgacataaacgagcgctgtgagcactgcaatatgatctctacaaccaccagacagattgtcctcgataccgaaaccaccggtatgaacaagcttggggtgcactacgaagggcaccgcatcatcgaaatcggtgcggtggaggtgattaaccgccgcctgaccgggcgcaacttccacgtatacatcaagccggatcggctggtggatccggaagcctacggcgtacacggcatcagcgacgacttcctggccgacaagccgaccttcgatcaggttgccgaggaattcctcgactttatccgcggcggcgagctggtgatccataacgcggcgttcgatatcggctttatggatcacgaattccgcatgttgcagcagggcatcccgaagaccgagaccttctgcaccatcaccgacagcctgttgatggcgcgtcgcctgttcccgggcaagcgcaacaacctcgatgccttgtgcagccgttatgagatagacaacagcaagcgtacgctgcacggcgcattgctcgatgccgagatcctggcggaagtttatctggcgatgaccggcggtcagacctcgatagcgttccagatggagggggatacccagcaaaatgacgccgcgcaagaaatacaacgcattgtccgcccggcgacggcgatgaaagtggtctacgccagcgacgaagaagtgaaggcgcatgaggcgcgtctggatctggtggcgaagaagggcggtagctgcctgtggcgcggggcgccggcggaataacggcgtttttgcgtgaaaaaacctcactggatgaatcttcgttgaaaaactgtgcaaacggttcatttgcggagaaaaaggcgttgacggaaccgagaggcgtccgtaatatgcgcctcgttcccccgcaagagggaatggcgcggagcggtagttcagttggttagaatacctgcctgtcacgcagggggtcgcgggttcgagccccgtccgttccgccactattcagaagccctgagttagcgataactcagggcttcgtcgtttccgttctctgaaaaacggcgtggcccaatgaacggggccggcagaccggccccttatcctcagaataacaccgaatagttcaagccgaaggtgcgtccgcggcctttatagctgtacagctcaggcgatccgtaggtcgggctgtacaggatcggcgcgcgttggccccaaacggtggtgtattccttgtccagcaagttttccacgctgaagctgattttccctaccggtagggtatagctgccgaggaaatcgagggtgttgtagccatcgattttgcggccctgggtggaattggccttggtgtaatcgccatcgtccgacacgtcgaaggtttgctgcgactgtaaacgcagattccagtcgcccggcgcccagccgacataagcggtgactttcgatgggctggcggtatcgactaccagcttcttccattcgccgttgaccttggtttcggagcggataacgttgaagttggtgccggcgttccagtcgctgtcttcaaagaagtagtccaccgccccttccagcccatagatgcgccgcttatccgcattgacgttaatggtcatgtcggttttgttgatggcgatgctcttgtcggacagcgagtagtaggcggcgatttgcgtgcgcaggttatcgccggtatagcgccagcccagctcgtaggcattgaccttgatgccttccagcttggaatcgccgacgttaacgctcttcagcaactggtaatgtccgccgttcaacgcgtaggtgccgttaccgtaatatttgcccggatccgggatctcaaagccctgagagaagttgaaccaggtttgctggcgctcggtcaggtgtgccaacaggccggcattgaacagcgcgttgttgtagtcggttttcccgcccggtatagcgtcggcggacgtcgcggcgccggtggcgattgcctgctgctggttataaccgacgaagtcatcaatcttgttttcggtgtactgataacgcacgccgccgctcagggtgaagatcgggttgatgtcgtagctggcctgcaggaacgacgccaggttgctggtggtatagctcgggtagcggccggtgctgtaagcgttctccagcgtcatgccgcccgactgctgagccttcgccaggttgaagaactgctggttggcgttgaagctttcatgctcggcgtcaatgccgtaagtcagcgtcagtgcgtcgacaggtttgctgtttaacgtcagcttgccaccgtagaaatcggttttttgctgcgaagcgccaatgctgctgacgtaatagttcggtgctttgcccgccagcgtcgggaacgggtagaaggtcaacgtttcgtcgcggtagtagacctgcgccaccagatcctggccgaggaaatctgtgttggaatattgcaggttgatcaggtggcgctcggtgccggggatgcggtcggaatttaagttaccgctgttatatgccttggcgttgccggtcaccgccgcaaagttctctcccaggaacaggccgtgatcgccgtcggattggcttttgtagtattgggtggtcagctgcagctgttgatgatcgtcgatgttgagggtgccggtgcccatcacgtcgaggcgatcggaatactgcaggccggtttgggtattgtcgatcaatacctcattgcctttgccgtcataccagccgccatagcgctggtaagaaacggacaggcgcccagagacgttgtcgttgccgccgctgaccgccgccgccacgttctcgtcgtgatcgttatggccgccaaagccggttttaccgccgacctgcaactcgacctgctgttcctgttgtccttttttggtgacgatattgatcaggccgccggtgctgccgccgccgtacagcgaggtcgcgccggaaatcacctcgatatgatcgatattgaatggatcgatcgaatccaactggcggctgtcgctgcgcgatgaattcaggcgcacgccgtcaatcatcaccatcattgagcggccgcgcatattcataccatagttggtgcggccctggccgctgacgtccatgccggggatcagctgcgccaacatgtccttgatctctttgccgccctgaacctgctgttcgatctcctggctttcgatcacccaggtggtttgcgccatttccgccgtgctgcggtgtgaacggctggcggagaccaccatctgctcttcggcgccggctttctgaccttctgcccaagccgtcggcgcaagcatcgccagcagacaaggattcaaaacccaaaggtgtttgcgtttcatcgttatttatttcccaggtgatattgttattgcgttatttttgagaatgattcttttatcaataacgtttcttgttatcaataaaatcatgatatgattttttgcgatacattaacgtaattaattagttttattaacattttacccgctgcgcgatcgagcaacccacaccgtcaacacggcagccgatcggccataggtgcaagcgacagccgttgccggagaaacgagaacatgtccgccagctacagaatttttgatatcaccttgaaaagcaaaacgctgatttcaccttcgctggtgcgctgcgtgtttgaaggtgcggatattcatcggatgaagttggaagcgccggatcagcgcatcaaactgctgttcccggcggcggacggccagatcccgcagttggccaatagcccggactggtatggcgattacatggcgatccccaaagagcggcgcccggtgatgcgcacttatacgctgcgtgcgctgcgccgtgagcagaatcagatggacgtcgagttcgtgctgcatggcgtgaacggcccggcctccgcctgggcgactcacgccgagccgggtgatgccattcagaccgtcgcccccaacgctgacttcgacggcgacagcggcggctacgaatgggcgccgccggcgcagttgcagcaggcgctgttgatcgccgatgaaacggccgtgccggcggcgatgggcattctggagcaattggcgcagcagaccaatccgccgcgcgtgcaggcattcttcgaagtgccgcaggcgggggattgcctggatttgacccgcttcccgttcgccgaggtttactggctgccgcgcgatgtgggccgccagttggcgcatggcacgttgctggcggaagcggtgcgccagcgggtggatattcccgcttcggcgtgcgcgcaagcgcagtctttggcggaaagcagcctgagcgatgaggtgttgtgggagcgggcggcgggcggcagcgctttctatgcctgggtggcggccgagtcttcggcggtgaaaaccctgcggcgttatctgatcggcgaacgcgatctggaccgcgctaccgttaactttatggcctattggtgctgaatgcgccgcccttttccggcgacgctgccggagaggggctggccgcggttatttcccatcaacgaataatcgcttgccagcgggtagttcggccgtgctatgttccgctgaaacaaaggttacagcgagaacgataatgcaacggttcgacgaacgtctgcgccgcgactacccacagctgaccccgcaggagcagcgggtggccgacttcatcttcgatcactatgacgatttgatcggctacaacagcgccgagctggcgcgcctgagcggcgtttccaaagccacggtcagccgcttgttcaaacggctgggctaccccaactaccgcgccatgcgcgatgagctgcgcaccctgcgccagagcggcatgccgctgaccgatagccgcgatgcggtgcagggcgatacgctgttggcgcggcactataagcaggaaatggccaatctcacccgttgggtaaagcagatcgatgccgaacagttcagtgcgactatcgccgcgctggcgcgggcgcgcggcgtgatgctgttggggctgcgcaacagctatccggtggcgatgcacctgcgtcagcaactgatgcaggtgcgtgaacaggtgctgctggcgccgcagccggggcagacgctggcggaagatctggcggggctgacaccgcaggacatggcggtggtggtggcgttccgccgccggccgcgccagataaaggcggtgttgacgctgttgcaaagccgcggggtgccgacgctgctgatctgcgaaccgcaggcgcaggcgctgttttcgttggccagctggcagttgaccgtgccgctcgacagcgtgtcggccttcgacagctatgccgccgccatgagcctggccagtttgctcagcaatgcgttgctgcatgagaggctggcgcaggggcgacagcgcattcatcacgtcgctgaactgttccagacgctggacgaactggagctgcgttaagcacggcagatcatattccttccttccccctccgccgtttaaggcggatcggtcacctcatggtgttactttggtttcattaattgatcataagaatcttttgtttcaactgaatccctatcgggagtaggctgttgggcagcaaacaaacgtcatgtcgacgctgaaggcataactcaataacttactaagctgacagggaatgaacatgttggatatctcgcaattcgatcagattaacccgccggcgcgcctgctgatggggccggggccgatcaacgccgatccgcgcgtgctgcgcgccatgtcgagccagctgatcggccagtacgatccggcgatgaccggttacatgaatcaggtcatggcgctgtatcgcgcgctgttccgcaccgaaaaccgctggacgatgctggtggacggcacctcgcgcgccggcatcgaagcgctgctggtttccgccattcgcccgggcgataaggtgctggtgccggtatttggccgcttcggacatctgctgtgcgagatcgcccgccgttgccgtgccgaggtgcatacgatcgaggtaccgtggggtgaggtgttcagcgccgatcgcatcgaagacgcgattaagcgggtgcgtccgcgcctgctgctgacggtgcagggcgacacgtccaccaccatgctgcagccgctgcatgagctgggtgatatctgccgccgccacggcgtgctgttttacaccgatgcgaccgcttccttcggcggcaacccgctggagaccgacgcctgggggctggatgcggtctctgccgggctgcagaagtgcctgggcggcccctccggcagttcaccggtcaccctcagcccgcagtttgaagagatcgtgcgccgccgtaaatgcgtggagcaggggatccgcaccgccgagcacgccgacggcgacgacgagatgatctactccaactatttcgacatcggcatgatcatggattattggggaccggagcgcctcaatcaccataccgaagccaccagcatgctgttcgcggcgcgggaatgtgcgcgggtgatcctcgaagaagggctggagcacgccatcgcccgccaccggctgcacggcgcggcgctgctggcgggcatccggggcatggggctggcggtattcggcgatcttgaacaccgcatgaataacgtgctcggcgtgatgatcccgccgcaggtacatggcgaacaggtgcggcagatgatgctgaacgacttcgccatcgagatcggcacctcgttcggcccgctgcagggaaaaatctggcgcatcggcaccatgggctacaacgcgcgcaaggattgcgtgctgcaaacgctggcggcgctggaggcggtgttgaaccgcctcggtttcgccagcaggcagggcgaggcattgcaggccgcctggaacgtttatgatgcgggacatcatggatgacgccgctggaggcgcagcaggccgccgtacgagtgatggcgcgctgtgacgagctggcggcgatcagcgcggagcccgatcggctcacgcgcctttatctttctgcggaacatcggcgcgccaaccggctggttggcgaatggatgcgcgagagcggcatggcggtttggcaggacagcgtcggcaatatctgcggccgctatgaaggtttaacgcccggcgcccccgcgctgctgctcggttcgcatctggacacggtgcgtaacgccgggcgctatgacggcatgctcggcgtgcttacggcgctggaagtggtggcgcgctatcaccgccaggggcgccgattgccgttggcgctggaggtgatcggttttgcggatgaagagggggcgcgcttcggcgtgacgctgctgggcagccgcggcctgaccggccagtggcctgcagagtggctggtgcgtaccgatgccgacggcgttagcatcgcgcaggcgatgcgtgacttcgggctggatccggcggcgattctacaggcgcgccgtgcgccacacgacatccgcgcctattttgagctgcatatcgaacagggcccgtgcctggaggcggccgacctggcgctgggggtggtgacggcgatcaacggcgcgcgtcggcttaactgtgtctttagcggggaggcgggccacgccggcacggtgccgatggggcagcgcaaagatgcgttggcggccgcggcggaatggatgatggcggtagaaaccctgacctgcgccgccgatccgcacctggtggccaccgtgggctgcatcgagagcctgccgggcgcggtcaacgtgatccccggcgaggtgcgcttgacgctcgacgtgcgcggcccgcaggatgcaccgctggcgacgctattgacggcgttgctggcgcaggcgcaagcgatctgcgcgcggcgcggagtgcgcttcgccagcgaggcgttttatcgcatcgacgccaccgcctgcgatagcgatctgcagcgccgctggcaggcggccgtcgagcaggtacaggggcagagtctggcgctgccgagcggtgccggacacgacgccatcgccgtggcggcgcactggccggtcggcatgctgtttgtgcgttgcgccggtggcgtcagccatcatccggccgaagcggtgcggcaggcggacgtggcgctggcgatccaggcctattgcctgatgatcgccggctgggagagtgtttgatcagtcaagacgcagaaagctgtcggcgtcgcgccaggccgggaaggcgctgcggtaactctgcaggctttccagcgacagctcggcgtccagccgcgcggctgcgccgggctccgcatccgccaggatctcgccctgcgggctgatgatcaggctgtctccgctgtagttcaggccgttggcatcttcgcccacccggttgcagcccgctacatacacctgattttcaatcgcccgcgccgccagcagcgtttgccaatggcggctgcgcggcgccggccagttggcgacgtacagcgccagatcgtaatcctgctgatagcgcgcccagaccgggaaacgcaggtcgtagcagatctgcggcaggatgcgccagccgcgccactcgaagatttcacgccggttgccggcctggtagtgcaggtgttcgccggccatgcggaacagatggcgtttgtcataggcatgcacctggccgcccggctccaccagcaggaagcgattgaccgcgccttcggcggttttcagcgccacgctgccgccgatcaacgcgtggcttttcaccgcccagccgtgcagccagtcgatcacctgctgttcgggcagggcgctctcgccggcatccatggcaaaaccggtggtgaacatttccggcaagacgatgagatcgcgcccgacgatcggcgccagcaacgcgtcgaaggcggccaggttagcaaggccgtcgcgccagaccagcggttgctgcaacagggtaatttttaaagtcgacataaccgctccgcagctgcatccagcgtggcgtcctgcttagcgaagcacagccggatcaatttatgagggaaaggatcggcacagaagaccgacagcggaatggccgccacgcccacgtgctcagttaaccaatggcagaacgccacatcgtccagatcggagatggcgctgtagtccgccagcaagaagtatgtaccggcgcagggtaaaatttccagtcggctgctcgccagcgcctgcacaaagcgatcgcgcttggcgcgatagaacgccggcagctgtcgccagtgctccggttcggtgcgcaggctatccgccagcgccagctgcgccggagtattgaccgaaaaggtcaggtattgatgcaccttgcgcacctcggcgctcagcgtggtgggcgccacgcagtaacccactttccagccggtcatgtggaaggttttaccgaaggaggacaccgcgatcgcccgttggcgcaattgcgggtgggccaatacgctggcgtggccgcctttggcgaagcagatgtgttcgtagacttcgtcactgagcacgtagatctcgcgttcggcgatggcgtgccacagctgctgcatgtcttccgcctgccaggcggtggcggacggattgtgcggcgtattgactatcaccaggcgggtgcgcggcgacagcgcggcggcgaaccgttgccaatccacggcaaacgcgggcggctgcagggcgaggcgtttgagtacgccgccggccagcgtcaccgccggcgcgtagctgtcgtagctcggatcgaaacagaccacctcatcgccggggcgaaccagcgccgtgatggcggcgaacagcgcttcggtagcgccggcggtgacggtcacttcggcggtggcgtccggctgccagccatacagctcggcggttttgtcggcgatggcttcgcgcagcgccgccacgccggtcatcggtgcatactggttggcgccctgggcgacatgccaggccaggcgtgctttcaggtagtccggcccgtcgaaatcggggaagccctgcgacaggttgatcgcctgatgctgctgcgccagcgcgctcatctgggtgaagatggtggtgcccagggcaggcagtttactttcgggaatcaatgcggaagtgctcatagcaggtgaatactccaggcgcttatattgccgtcaatataacacgatgctagtatttggcaatcaagacgcttagatggctaaatgagaaaaagtgcttagcctgtcgcgcagccggctaagcctcacctgctgaccgctataccgaacgggaaacgataacaatgacggagaatccgcaacttaccgcattactggcggcctgccactggattggcgacaaaggctggtgtccggcgaccggcggcaacatgtcgttgcgcctcgacgaacgccagtgcctggttaccgagtccggcaaagacaaaggcagcctgagcgccgccgattttctgcgggtggatattgctgacaatcatgtgccgagcggccgtacgccgtcggcggaaaccgggctgcatacgctgctctatcgcttgtacccgcaccttggcgcggtgctgcatacccattccgtcaacgccaccgtgttgtcgcgggtggaacgcggcgatgcgttggtgctgcaggggtacgaaatgcaaaagtcgctcgccggccagcgcagccacctggacagcgtggcgatccccattttcgataacgatcaggacattccccggctggcgtcgcgcgtggcggcctatgccgaagtcacgccgctgcagtacggttttctggtgcgcggccacggtctctattgctggggaagccaggtggcggaagcccgccgccatctcgaagggctggaattcctgttccagtgtgaactgcaacgtcgcttgctggaggcgaaatgatccgcgctatcgtgaccgatattgaaggcaccaccagcgatattcgcttcgtgcatcaggtgctgtttccctatgcccgtgaacggctggtggattttgttcgccgtcacgccacggagagcgaagtcgccgcgccgctggcggcgctgcgcgctgaaattgaccagccacaggcggatctcgacgcgctgatcgccgcgctgtaccgctttatggatgaagaccgcaaatccaccgcgctcaaggcgctgcagggcatcatctggcgtagcggctatcgcgaaggggatttccgcgggcatctgtacccggaggtcgcggggcagctggccgcctggcagcgtcaggggctgcagctttacgtctattcctccggttcggtggaggcgcagaagctgctgttcggccacagcgacgccggcgatctgcagccgctgtttagcggctatttcgacacgcacgtcggcgccaagcgtgaaaccgcgtcgtaccgcaacattgcgcaggctatcggcatcgcgcccgacgaactgctgttcctgtccgatatccaccaggagctggacgcggcgcaggccgccggctggcatacctgccagctgatccgcgatgaggcggacgcacaaagccggcatccacaggtcagccgttttgatcacatcgatttaggggagtttgtctcatgagtggattgaccattttcagtgatacagcgccgcagcagccgctgtggcagagccgcgacgcgcaggaaatccagcgccagctggcgcagatcggcgtgcgctttgagcgttggcaggcggatcgcgagctgggcgacaatccgcagccggaggcggtgatcgccgcctaccagcatgagatcgaccggctggtggcggaaaagggctaccagagctgggacgtgatcagcatgcgaccggaccacgaacagcgccaggcgctgcgtgaaaaattcctgtccgaacatacgcacggcgaagatgaagtgcgctttttcgttgaaggggcggggctgttttgcctgcatctggacggcaagatcttccagatcctgtgcgaaaagaacgatctgatctcagtgccggccaacacccgtcactggttcgatatgggctcggcgccgcactttaccgcgatccgggtgttcgacaacccggaaggctgggtggcgcatttcaccggcgacaagatcgccgatgcctatccgcgtctggactgatcgttaaccggcgggcgttaacccagcgtccgccggaagatccccgcttcaacctgttgcggcgtgatcacgccgctgtcgaacacccacccgctgatgagttttgccggcgtgacgtcgaacgccggattgtagaccggcgcctcggccggcgcccactggcaggcgccgaagctgcctgaaacgccggtgacttcggccgccgcgcgttgctcgatcgggatggcggcgccgtccggacagtgcggatcgtgggtggtatgcggggcagccacgtaaaatggaatgccatggtagtgcgccagcaccgccaggctgtaagtgccaatcttgttggcgacgtcgccgttggcggcgatgcgatccgcgccgacccacaccgcatcgacctggccctgcgccatcaggctggcggccatcgaatcgcagatcaggcgatagggaatgcccagctcgcccagttcccaggcggtcagacggccgccctgcagcagcggccgggtttcatcgacccatacctgttgcaccttgccctgctggtgggcgcgcagcagcacgccgatggcggtgccgacgccggcggtggccaacccgccggtattgcagtgggtcagcaggcggctgccgggcttgaccagaccagcgccgcgatcggcgatgcgatcgcacagcaggcgatcttcctccaccaaccgcagcgcttcgttcaccatcgccggcgcccagtcagactccgccagcgcccgcttcatgcgatccagattgttcatcaggttaaccgccgtcgggcgggcggcgcgcagcgtgtgcagcgcctgctccagctcggcgcgcggcagaccgcgctccgccagcagcgccaacaacaggctggcggacagcccgatcagcggtgcgccgcgcacccgcaggctgtgaatgtgcccgaccaactcctccacgctgtcgcaagcgcgccaccgcttttcctgcggcagggcttgctgatcgaggatccaaaggcggttgtcctgcagggtcaaactggtggtgttaagcgcttgcatcggcggttaattccttgttgcgaggttattgcatctgaaacgctattctgccaacatgacttccagatgtatagacgtccaaatgcttttacgtctaaataaacagaatcgctgagggcagcgagagagaacagaggggttggggaatgtcgctttatcgtacgtttacggctgccgatgccgttgaatacgcccgccaatacgggcaggtggccgatccgcaggcgctggtcagcgccgacgagatcggcgacggcaacctgaacctggtgttcaagatccgcgatcgcgaaggcgtgagccgggtgatcgtcaaacaggcgctgccctacgtgcgctgcgtgggcgaatcctggccgctgacgttggatcgggcgcgcatcgaagcggaaacgctgttgatccacggcggtttctgcccgcggcatacggtaaaagtcttgcatcacgatcctgagttggcggtgatggtgcaggaagatctctccgatcatcgcatctggcgcagcgaactggtgcaggggaactatcatccgctggcggccggtcagctggcggaatacctggcgcagacgctgttccacacctccgatttttatcagtcggcgcagcagaaaaaggcggaagtcagccgtttcaccaaccccgaactgtgccagatcaccgaagatctgttctttaccgatccctatatcgaccatgagcgcaatcagttcgaggcggcgctgttgccgcaggtacaggcgctgcgcgaggatgcgccgctgaagttggcggtcgccggcctgaaacatcgcttcctcagcaaggcggaggcgctgttgcatggggatatccacagcggttcgatcttcgtggcggaagggcgattgaaagcgatcgacgctgaattcggtttctacggcccgatcggtttcgatgtcggcactgcgttaggcaatctgctgctcaactattgcggccagccggggctgttcgggccgcgcgacgccgccgccgggcgcgagcagcggctgcaggatgtgcgcgagctgtggctgatctttgccgatcgtttcctggcgctgtgccatcagcaaagccgcgatgcggcgctggcgacgccgggttacgccgagcagttcctgcagcaggtctggagcgacgcgataggatactgcggcaccgaactgattcggcgcaccatcggcctggcgcacgtcgccgatctggacagcatcgccgacgctgacatgcgcctcgactgccagcgtcatgcgctgggtttggggcgcacgctgatcgtcaatgcaccgcagatcgagcatatcgacgcgctgttggcgcgcattcgtcagcaaggctgaaaaggcgggtgctcgtggatccagcctgacatcatcagccaacgggcggggcgaaccccgccgttgggttgccttaccgttcggattcgtaagccaaagtggccgcaacctccgagtctcccaacctgatgcgcagttcgcacagcgaaccgcgggttagccagatgaacgcgatcagcgtcatacagacgatcaccagtttaagcacgacccgtttttgctgcatttttgacctccctatccttgccttgcggcgggtaagaggctaacctgatgttgcttggcatcagagtggcctcgggttgataatatcgactcggggcctttctctttctctcctttgccaaggcgccggacagaaagatccagagcacccgcggcgcagtctacccgaacttccttcccgttaaatccgccgttgcgccaacctgcggcgcggtgcgcagtttgtcatgaaagcaaaagaaaaaggggcgatgatgatcgccccttggatgcgtgaagtgaaccttaagccgcttcggtctgctgctggcgcttagactgcgccgccggcttttccggcttggcggccgccagcgcgtccggcgcgaagtcgtctacgttgatggagcgcaggcggctctcttcggctttcaccaggatcttcgcctcgtcggcgctgatcttgccttcttccagcgcgcgctccgccaaacgatccagacgggtgaacggcaggtttttgccggctgccttgcacaggcgttcgtgaatcggctcagcggccatcacgtcggccagcgccgcttccagcaggccgattgggttatgctcgctcggcgtcaggtactggccgcgccccagacggctgcgggtggcggaaggcacctgcaggatcttggccagctgatgatccaggcgatcggacggtgcggtatgcacgcggccgaacgggaagaccacgaagcgcagcgcgccggcgataaagcggttcgggaagttgcgcagcagatcatccagcgcctgttcggctttatgcaggctgtcttgcacgccccaatgcaccagcggcagatcttctttctgacggccttcgtcgtcaaagcgtttcagcacggcggaagccaggtacatctggctgaggatatcccccaggcgagcggagatgcgctcgcggcgcttcaggctgccgcccagcacgcccatggaaacgtccgacagcaacgccaggttggcgctcaggcggttcaactgctgatagtaacgacgggtcgcgtccttggttggcgtggcgctggtgcggccgttggtcagacccagccagaagctgcgtaccttgttgctaccgacgtggcccaggtggccgaacagcgatttatcgaaggcgttcagatcgttgttctgcgccgccgccatttcatccagcacataaggatggcagcggatcgcgccctgaccgaagatcatcatggtgcgggtcaggatgttcgcgccttccaccgtgatggcgatcggtgcgccctgataagcgcgagccaggaagttggattcgcccagcatgatgcctttaccgccggcgatgtccatggcgtcaacgatcgactgctggccgcggtgcgtacagtggtatttgacgatggccgacagcacggccggtttctcgccctgcaccagtgcataggtgatcagcgaagcggcggcgtccatcacataggtgttgccggcgatgcgcgccaacggctcttcgatcccttccatcttgccgatggagatcttgaactgacggcgaatgtgcgcgtaggcgccggtcgccagggcgatggatttcaggctgccggtggagttggacggcagggtgatgccgcgaccgaccgacagacattcaaccagcatgcgccagccctggccggccattttcggcccgccgatgatgtaatcgatcggcacgaacacgtcggtgccgcgggtcgggccgttctggaacggcacgttcagcgggaagtggcggttgccgatttccacgcccggcgtgctggtcgggatcagcgcacaggtgatgcccggggattcgttgtcgctcagcaggcggttagggtcatgcagtttgaatgccaaacccagcacggtggcgaccggcgccagcgtgatgtagcgcttgttccaggtcaggcgcatgcccagcacctgcttgccttgccattcgcccatgcacacggtgcccacgtccgggatcgcgccggcatcggaacccgcttccgggctggtcagcgcgaagcaagggatctcgtcgccgcgcgccaggcccggcagatagtggtttttctgttcttcggtaccgtaatgctgcagcagttcgcccgggccgagggagtttggcacgccgacggtgatcgccaggatgccggaaacgccggccagtttttgcagcaccatcgcctgagcgtaaggggagaattccaggccgccgtactctttcttgatgatcatcgcgaagaaacggtgttctttcaggtatgcccagagttcaggcggcagatcggccagttcatgggtgatctggaagtcgttggccatgcggcaggcttcttccaccgggccgtcgataaacgcctgctcttcttccgtcaggcgtggtttcgggtagctgtgcagcttgttccagtccggcgcaccgcggaacagatcgccttcccaccaggtagtgcccgcgtcgatcgcttccttctcggtggtggacatcggcggcatcaccttgcggaaggcgcgcagcgccggcgcggagagcagagagcgacgcacagaggaaaggttcagcggcagcagcacgatcgccagcggcagcaacagccagaagctccacaggccgatcgcgcccatggcggcagtgtatgccaccaggatcaggctgctgagggtaaggttcactcggtggtagaacaccacgccgaggagcgccagtaaaacgacaatactaagaaccatcataagaagctccgaagtagtaagaggtctgacctgttgtgtgtatgtaataggttttagtacaaggcagaatttttatcaatgcgtttacagtttaattacaactcaggtcacaaactgacagcaccaatcatcaaaaacctctccgcttccttaaccggcgcgctgtttggctgagaatgcttctcgctgtttccgcgatccggtacactgcggagcggaagatttgacgataacaagaggttcctcatgtaccacgaccttattcgcagtgaactgaacgaagcggctgataccctggcgaaatttatcaatgacgacgccaacatcgacgccatccaacgcgcggcggtgctgctggcggattccttcaaagccggcggtaaagtgatttcctgcggcaacggcggttcccattgcgacgcgatgcacttcgccgaagagctgaccggccgctaccgcgaaaaccgcccgggctacccggcgattgccatctcggacgtgagccacctgtcctgcgtcagcaacgacttcggctatgagtatgtgttctcgcgctatgtggaagcggtgggccgcgaaggcgacgtgctgctgggcatttccacctccggcaactccggcaacatcatcaaggccatcgacgcggcgcgcgccaaggggatgaaagtgatcaccctgaccggcaaggacggcggcaagatggcgggttccgccgatgtggaaattcgcgtgccgcacttcggctacgccgatcgcatccaggagatccacattaaagcgattcacatcttgattcagctgatcgaaaaagagatggttaaggcgtaatagccttcggggggctgcagctccccatgaataagactgcgggcgccgcatatatgccgcgcccgcacagcctgtgtcagtgtggttaaggagtgctggcgatgtgtgaactgctcgggatgagcgcaaacgtaccgaccgatatctgcttcagctttaccggcctggtacagcgcggcggccgcaccgggccgcataaggatggctggggcattaccttctatgaagggaacggctgccgtacattcaaggatccgcagccgagcttcaactcgccgatcgcccgcctggtgcaggactacccgatcaagtcttgcgcggtggtgtcccatattcgccaggccaaccgcggcgaagtggcgttggaaaacacccatccgttcacccgcgaactgtggggccgcaactggacctacgcgcacaacggccaattgaaaggctatcgccagctggataccggcacgttccgcccggtcggccagaccgacagcgaatatgcgttctgctggctgctgcaccagctggcgctgaaatatccgcgcaccccgagccagtggccggcggtattccgctacattggcctgttggcgagccagctgcgcaagaaaggggtgttcaatatgctgttgtcggacgggcgcttcgtgatggcgtattgctccaccaacctgtattggatcacgcgccgcgcgccgttcggcaaggcgacgctgcttgatcaggacgtggagattgattttcagcaacagaccacaccgaacgatgtggtcacggtgatcgccacccaaccgctgaccgccaacgaaacctggcacaagattgagccaggcgagttcgcgttatttcacttcggtgagcggcttgttctgagcgaaggggttggtgttgggcgtcgggctggctgacgcgtactgcgtcatcatgccgccgctgctcatcagcggttgacccaagacgtactggccattgaccacgcccattgtcggcggttggcggttcttcgcgaagtaatcgtagcccggcttcagctggcgccagaaggcgatatagctggatgacgcatggcgtttcaggttctgttcggtcatgcggaacgggtagatgctgatgtcgacgcggctttggccataggcgaaggcggcttcgacgtagcgatagatctcatccatataggtgttggtcatcgcgtaacagccgatcgatttacattcgccgtggatcatcagataagcgccggaatagccctgcgacttatcgtaatcgttaggaaaaccgatattgatcgcccgataatacttgctgtcgggtttcagatggcgcgcgtcaacgctataaaagccttcaggacttttaaagtcgccttcacgacgtttaggacccagcccgccggagaaattacagatcgggaacgtgttgaccaggcggaattcattgcccattctggcatacaattccagcttgcgttcctctttgaagatctgaatatagaccggcgaacccaataattgctgtttaactaccggcgcttcgggtacctgctcgctggcgctgcaggccgtgatcatcggcatagaaacaagcatcgcaaacaacagcgcgattttgctcattataattcctgcttatatttatctgccggcgcaatcaacctggccagcatgccactgattattgtttttactgctgcaaaacaccgccagattaccagcgcgtttatttttagcaatacgtgatatgtataaaaaaacgacaaagctcgataaaagtgaaatgaccggcagattttaacgataagtagtgaaaaacaggcgaaatttaattgcgtttgcttgacccaagtcacgacgtaacgcagaacaatgttgcgaacaatgttaatattctctcttcaatttaacgcgcggtggcgattgaagcggcaggggttatggcatataacccggccgtttcggtggttatttggctacaggccgttaacacatcgattgtcacgcaaataacggagaggggggaatcaagggaatgcgcgttaccccatatattcactgcgagaaagttcatgttgggcgtgccgccatgcgcactgcccggcaatcctggcatcgtccgcacccgcctctggggccgggcagacgtgtaaaccaaactacatcgtataaatcctatgattaagatcagaaaagggctggatctgccgatagccggggttccggttcaggcgatccaagatggcccgaacattcagcatgtcgccctgcttggggaagagtatgtcggaatgcgcccctccatgctggtgcaggaaggcgataccgttaagaaaggccaggcgttgttcgaagacaagaaaaaccccggggttttcttcacggcacccgccagcggccgcatcgccgcgattaaccgcggcgagcggcgcgtattgcaatcggtggtgattgcgctggataacggcggcgacgatcagctcgagttcgcgcactacccgctgggtgaactgagccagctgccgcgcgaacaggtcgaaagcgaactgatcgccagcggactgtggaccgcgctgcgcacccgtccgttcagcaagacgccggctcccggcagcgaaccgcgcgccattttcgtcaccgctatggacacccagccgttggccgccgatccgcaggtgatcatcgccgagcagcaggcggcgttcaacgccgggttggtggtgctggcgcgcctgacggcaggcaaggtgcacgtgtgccatgccgccggcgcttcggttggtcagcagagcggcccgcagatcgcctacagcgaattcgccggcccacatcccgccgggctggcgggcacccacattcacttcctcgaaccggtcagcctgaagaaaaccgtttggcacatcggttaccaggacgtgatcgccatcggcacgctgttcaccaccggcaagctcgatacccgccgtgtggtggcgctggccgggccgcaggtggcgcagccggcgctgctgcgcacccgcctgggggccagcctcgatgagctgaccgccggccgcctgaaaggcggcgagaaccgggtgatctccggttcggtgctgaacggcatgcacgccgccgggccgaacgcctggctcggccgtttccactcgcaggtgtcggtgctggaagaagggcgcgacaaagagctgttcggctggatcgtgccctcgccgaacaagttttccattacccgcaccacgctgggccacttcctgaagaacaaactgttcgccttctcgaccaccaccaacggcggcgagcgcgccatggtgccgatcggcaactacgagcgggtgatgccgctggatattttgccgacgctgctgctgcgcgatctgctggcgggcgacagcgacagcgcgcaggcgctgggttgtctggagctggacgaggaagatctggcgctgtgcaccttcgtttgccccggcaagtatgagtacgcgccggtgctgcgcgaggtgctgaccaagattgagcaggaaggataaccgatgggcctgaagaattatttcgagaagatagagcatcacttcacgccgggcggcaaactggaaaagtggtacccgctgtatgaagcgaccaccacggtgttttacacccccggcacggtgacgcgcggcgcttcgcacgtgcgcgacgccatcgatttgaaacgcatgatgatcctggtgtggctggcggtgttcccggcgatgttctggggcatgtacaacgtcggccagcaggcgatcccggcgctgcaccatctgtacagcggcgacgcgctgcaacaggtgctggcgggcgactggcattatcgcctggcgcagtggctcggcgcctcgctggcggccgacgccggctgggtcagcaaaatggtgctgggcgcctgttacttcctgccgatctacgccgtggtgttcgtcgtcggcggtttctgggaagtgctgttcgccattatccgcaagcatgaggtcaacgaaggtttcttcgtcacctctatcctgttcgcgctgatcgtgccgccgaccctgccgctgtggcaggccgcgctgggcatcaccttcggcgtggtggtggccaaagagatcttcggcggcaccgggcgcaacttcctcaacccggcgttggccggccgcgccttcctgttcttcgcctatccggcgcagatctccggcgatctggtgtggacttccgcggacggtttctccggcgcgacgccgctggcgcagtggagcgcaggcggggcgcacagcctgagcaacgtagccaccggccagtccatcagctggatggacgctttcctcggcaacattcccggctcgatcggtgaggtgtccacgctgatgatcctgatcggcggggcgattatcctgttcggccgcgtggcctcctggcgcatcgtcgccggcgtgatgctcggcatggtggcttccgccatgctgttcaacgccatcggttccgacaccaacccgatgttcgccatgccgtggtactggcacctggtgctgggcggtttcgccttcggcatgatctttatggcgaccgacccggtttccgcctccttcaccaacaaggggaaatggtggtacggcattctgatcggcgtgatgtgcgtgctgatccgggtggtcaaccccgcctatccggaaggcatgatgctggcgatcctgttcgccaacctgttcgcgccgctgttcgattacctggtggtgcaggccaacatcaagcggagaaaagcccgtggcgaatgaagcgaaaaacgacggcatcggtaaaacgctgctggtagtgctgctgctgtgtctggtgtgttcagtggtggtggcgggctccgccgtcggcctgaagtccaaacagcaggagcaaaagctgctcgataagcagcgcaatattctcgacgtagccggcctgttgcagccgaaaatggagagcgagcaggtcaagcgcctgtacagcgagcgcatcgaaccgcgcctggtggatctgaacagcggcgagtttgtcgccggcaaagcggcggcgttcgatctgggcgccgcgctgcgcgacgacgccaaaagcgtggcgctggcggcgggcgacgatccggccggcatcaagcgccgcagcaaccaggcggaaatctacctggtgcgcgatgaaagcggccaggtgaacaagattgtgctgccggtatacggcaccggcctgtggtcgatgatgtacgccttcgtggcgctggataacgacggcaacacggtcaagggcatcacttactacgaccagggggaaaccccggggctgggcggtgaggtcgagaacccgtcctggcgccagcagtgggtcggcaagcagctgttcgacgacaacggccagccggcgatccgcgtggtgaaaggcggcgcgcgccagggggatgtgcacggggtagatggcctgtccggcgccacgctgacctccaacggcgtgcagcatacgtttgatttctggttgggcgagcacggcttcggcccgttcctgaaaaaagttcgtgaaggagcgctgaaaaatggctgattccaaagagataaagcgggtcctgctggggccgctgttcgacaataacccgatcgccctgcaggtgctgggcgtctgttcggcgctggcggtgaccaccaagctggagacggcggtggtgatgaccattgcggtgacgctggtgaccgcgttctccagcttcttcatctcgctgatccgtcaccatattcccaacagcgtgcgcatcatcgtgcagatggcgattatcgcctcgctggtgatcgtggtcgatcagctgctgcgtgcctatgcgttcgagatctccaagcagctgtcggtgttcgttggccttatcatcaccaactgtatcgtgatgggacgcgccgaggcctacgccatgaaatcgccgccgatcgagagctttatggacggcatcggcaacgggctgggctacggggtgatcctggtgctggtcggtttcctgcgcgagctgatcggctccggcaagctgttcggcgtgccggtgctggaaacggtgcagaacggcggctggtaccagccgaacggcctgttcctgctggcgccgagcgcgttcttcatcatcggcctgctgatctgggtgctgcgcaccctgaagccggcgcagatcgaaaaggagtaaaggccgatggaacactatatcagcctgtttgtgcgcgcggtgttcgttgagaacatggcgctggcgttcttcctcgggatgtgtaccttcctggcggtgtcgaagaaggtctcgaccgcctttggcctgggcatcgcggtgaccatcgtgctcggcatttcggtgccggtgaacaacctggtctacaacctgatcctgcgcgacggcgcgctggtggaaggcgtcgatctgagcttcctcaacttcatcaccttcatcggcgtgatcgcggcgctggtgcagattctggagatgatcctcgatcgcttcttcccgtcgctgtataacgcgctcggcatcttcctgccgctcatcaccgtgaactgcgccatcttcggcggcgtgtccttcatggtgcagcgcgactacaacttcgccgaatcggtggtgtacggcatcggttccggcaccggctggatgctggcgatcgtcgccatggcggggatccgcgaaaaactcaagtatgccaacgtgccggcagggctgcgcggtctgggcattacctttatcaccaccggactgatggcgctgggcttcatgtccttctccggtgttcagttgtaaaggcgggaagaatttatggaaattattttaggcgtagcgatgttcaccgccatcgtgatggtgctggtgttgctgatcctgttcgccaaatcgaagctggtgaacaccggcgacatcgcggtggaaatcaacggcgatctggataagagcttccatgcgccggcgggcgacaagctgctcaacgtgctctccagccaggggatcttcgtctcctcggcctgcggcggcggcggctcctgcggccagtgccgggtggtgatcaaagagggcggcggcgatatcctgccgaccgagctctcgcacatcaacaagcgcgaagcgaaagagggttgccgcctggcgtgccaggtgaacgtgaagcagaacctgaagatcgagctgccggaagagatcttcggcgtgaagaaatgggaatgcgaggttatctccaacgataacaaagccacctttatcaaagagctgaagctgaagatccccgatggggaagacgtgccgttccgcgcgggcggtttcatccagatcgaagcgccggcgcacgacatcagctacgccgacttcgacgtgccgcaggagtatcgcggcgactgggacaagttcaacctgttccgctaccgctcgacggtgaacgacaccacggtgcgcgcctactcgatggccaactatccggaagaaaagggcatcatcatgctcaacgtgcgtatcgccacgccgccgccgaacaatccggacgtgccgccgggcatcatgtcttcctatatctggtcgctgaagccgggcgacaaggtgaccatctccgggccgttcggcgagttcttcgccaaggacaccgacgccgaaatgatctttatcggcggcggcgcgggcatggcgccgatgcgctcgcacatcttcgatcagctcaaacgtctgaactcgaagcgcaagatcaccttctggtacggcgcgcgttcgctgcgcgagatgttctatgaagacgatttcaaccagctgcaggcggagaacgacaacttcacctggcacgtggcgctgtcggatccgcagccggaagataactggaccggctacaccggctttatccataatgttctgctggagaactacctgaagaaccacccggcgccggaagactgcgagttttacatgtgcgggccgccgatgatgaacgccgcggtgatcaagatgctcaaagatctgggcgtcgaagacgaaaatatcatgctggatgactttggtggctaaattgcgcgcattggcgacgaagaactggctgacgggcgtggcgctgagcgccaccctgctgctgaccggctgcgggccggaacaggtggatctgacgggtaaaaccatgggcacctcgtattcgatccgttacgtgaccggtgacaatacgccgtcggcgcgcgagatgcaggcggagatcgacaaacggctggagcaggtgaacgatcagatgtccacctaccggccggattccgagctaagccgcttcaacgccagccgcgacattgaccggccgttcccggtttcgccggccaccgccgaagtggtgcgcgaagcgctgcgcatcaatcgcgtcaccgatggcgcgctggacgtgaccgtcgggccgctggtcaacctatggggtttcggcccggaagggcggccggacaaagtgccgagcgaggcggagctggcgcaccgccgcgcctggaccggcgccgacaaactgtcggtgcagggcagcgcgctggtgaaaagcatccccgagctgtatgtcgatctgtcttcgatcgccaaagggtatggcgtggacgtggtggcggaatacctgcaatcgcagcacgtgcaaaactacatggtggatatcggcggcgaggtgcgcacgcgcgggcataacagcgaacaaaagccgtggcgcattgccatcgagcgcccgaccaccggcgcgcagcagcaggcgcagctggtgatccagccgggggagatgtcgatcgccacctcgggtgactatcgcaactacttcgaacaggacggggtgcgctattcgcacaccatcgatccggtcaccgggcggccgatccatcatcggctggtgtcgatcaccgtgctgagcccgacctgcatgaccgccgacggcctgtccaccggcctgaacgtgatggggccagagcgcggcatggcgcaggccaacctgctcggtatcccggtgttcatgatcgtgaaaaccgccgacgggtttgaggagcgttattcggacgcgttcaaaccctatctgaaaaagcgttcgtgaggttgctatgttgacggtattcgccgctaccttcgtgttgttcctgctgatcgtcggcgggatgtcgctgggttacgtgttcaaacgcaaaagcctgcagggcagctgcggcggcatcaccgcgctgggcatggagaaagtctgcgactgcccggagccgtgcgatgcgcgcaaaaagcgcgaagccaaagcggcacagcggcgcgagcagttggacaagcaccgcattctgtagcgaagcgaaaacccggccttggccgggtttttttatttcgccttgcggaagcttttcgcctcggccggcgagttgaccatcacgccgtcggcccccagcgccagcgcctgctgatactcctgcggcgtgttgacgccgaacagaatgatgtgcgccgggccctgcgagcggaaacaatccatcgactctttatcccaggtcagaaacgccttcgagcgcccttcgccgagggtgtacttctctaccacttccacctcacgcttcagctccagcccataccagcgcggctgtcggttgtccggtttgacatcgcactggtgcgccatggtgacgttagccagcagcgtgcgggtctcgtcgcggctttcgaagcgcgggatggccggcggcagcgcctgcaggtatttggcatcggtagagtagacgcgggtgcggttcaggctgtcggtgctttccagcgtcgccagcagcgcctggccaaactgcgccggatcggcgtccggggatttgatgtccagatagaaggtgacgtgcggaaacgcctttagcacctcgtccagtcgcggaatgccgatgccctggccgcggaacggatgtgcatcgcctttggcgaacgcccagccggcatcggtctcggccaattgcgcggcggtataggcagagaccgggccctgccggttggtcagcgccttcagatccgaggggcgatacagcacgatgacgccgtctttggatgcttgcagggtgatccaaacggcgtcggcgccgtttttcagcgcggtttcgatggcgatgcgggtgttttccggcgcatcggcggtgccgccgcgatgggcgacgatcgccggcgcgtgaccggtggcggcgctggccgccaacgcgctcagcgacagcgcggaagccagcagcaaataagaaaatctgatcatgtagggtaccttgtcgttatcgttgtggtgagctgcacgggatggcggaaatcatactattgaaaaattaagcttttttaacaacgcggaaatatctggcggaaacggcgctttcatcgaagcctgcggccttgagctttcggtatctgactgtatacttatacagtgttactggagggtgcgatgcgtaaaatcattcatgtcgatatggactgcttcttcgcggcggtggaaatgcgcgacgatcccagcctgcgcgatatcccgctggcgattggcggcagcgccgatcggcgcggggtgatcagcaccgccaactacccggcgcggcgctacggcgtacacagcgccatgtccacggcgatggcgctcaagctgtgtccgcatctcaccctgctgccggggcgcatggcggcctataaagaggcttcgctgcacatccgtgaaatcttcgcccgctatactccgttgatcgagccgctgtcgctcgatgaagcctatctcgacgtgaccgacagcccgcaatgcaacggctcggcgacgctgatcgctcaggagatccgtcaagcgattgccgacgagctgaacctcaccgcgtcggccggcgtcgcgccgatcaagtttctcgccaaaatcgcctccgagataaacaagccgaatgggcaatacgtgatcaccccggcgcaggtgccggcgtttttgcagcagctgccgctcagcaaaatccccggcgtcggcaaggtgaccgccaagcggttggaggacgtggggcttatcacctgcgccgacgtgcagcaatacgatttggcgcagctgctcaagcgcttcggcaagttcggccgggtgctgtgggagcggtgtcagggcatcgatcggcgcgaaatctcggcggagcggctgcgtaaatcggtgggcgtggagcgcacgctggcggaggacattcacgactgggaagattgcgaaacgctgattatcgacaaactctaccccgagctggagatgcggctgcgtaaggtgaagccggatctgcatatcgcccgtcagggcgtgaagctgaagtttcaggattttcagcaaaccacccaggagcacgtgttcccggtgctgaatcagcaggatttgctggcggtggcgcggcaggcgtggcgcgaacggcgtgaagggcgcggcgtgcggctggtggggctacatgtgacgctgctcgatccgcagctggagcggcagctggcgctgccttgggaataaaaaagccggcgattagccggctttttgcgttaagcgcgcagattacgcgcgctcagggatcgctttcagcagcgaggtcagcagcttccagtacagaccgacgctttcgatatgcacctgctcatccggcgagtgcgggccggtgatggttggcccgatcgataccatgtccatgtttggatacggctttttgaacagaccgcattccaggccggcgtggatcaccatgatgttcggcgtcttgttgaacagctcctgatacagctcgcgcaccaggtgcatcaccggcgagtcggcgtccggctgccagcccgggtagccgcccttcggtgccaccttggcgccggccagctggcccagcgcggtcagcatctcgaccacgtaatctttgccgctgtcgatcagagagcggatcaggcagatgatttccgcttcgttttcgctggtggtgaccacgccgacgttcagcgaggtttccactacgcctttcaccgcgtcgctcatgcggatcacgccgttcggcgtgccgttcagcagcgccaggaagcgttgctggctgtcggcgctcagcgcctgcgaagcgctggtgaccggctccagcagcacggtgatgttcttctctttggcggagagttcgttctgcagcaccgccaggaactcctggctcagcgctttcagcgcgtcggctttttccgccggcaccgcaaccaccgcggaggcttcacgcgggatggcgttgcgcagggtgccgccgttcagatccagcacgcgcaggttcagctccgccgcatgggagaacaggaagcgcgccagcagtttgttggcgttgcccagaccgacgtggatctcggcgccggagtggccgcctttcaggcccttgagggtcagcttcagggtttggtaaccggccggcaccgcttcgcgctgcagcggcagggtggtgatgaagtcgataccgccggcgcaacccatgtagatttcgccttcttcttcggagtcggtattgatcaggatgtccgcctgcagccagtttggctgcagcccgaaggcgccgtccatccccgcttcttcggtcatggtcagcagcacttccagcgggccgtgctcaacgctgtcgtcggccagcaccgccagggcggaggccatgccgatgccgttgtcggcgcccagcgtggtgccgcgcgctttcacccactcgccggcgatataaggctggatcggatccttggcgaagtcgtgcacggtgtcgttattcttttgcggcaccatgtccaggtgcgcctgcagcgccaccggcttgcggttttccatgcctttggtggccggtttgcgcagcaggatattgccgacctgatcgcgctcggcgtgcaggttcttctctttggcccaggtgaggatgtgctgcgccagcgcttcttcatgataagaagggtgcgggatagaacagatcttggcgaaaatatcccacagcggctgtggcgaaagctgagacaattcagacactataagtctcctgtgacggcaggctccgacaggacgggcgtgccgcgcggttgaggtgagcgggtatctgtgcgtcgtggcacgatcgttagagaatatcactttatttccggcggcgcgcgccccgtattgtgcggtttaagcgcttgatcacacggcttcgcggcgggaacgttcgctttttcagcatcaatcaccgaaaagccgcgcggcggaaatcgcgaggttttcctcggtacagctggaattcaacgcggccagtctctataatctcgcgcaaccttttttcccctgaactataaagtaagccgcttcaccagccggctgggacacgattctatgagcgaaaaatacgttgttacctgggatatgctgcaaatacatgcacgcaagctggcgcaccgcctgctgcctgccgacaaatggaccggcatcattgccgtcagccgcggcggcctggtgccggcgggcctgctggcgcgcgaactgggcattcgctatgtggataccgtctgcatttccagctacgaccatgacaaccagcgcgaaatgaaagtgctcaagcgcgccgaaggcgacggtgaaggcttcatcgtggtggacgatctggtggataccggcggcaccgcaaaagcgatccgcgacatgtacccgaaagcgcatttcgtcaccatcttcgccaagccggcgggccgtccactggtggacgactacgtgatcgacatcccgcaggacacctggattgagcagccgtgggacatgggcgtcagcttcgttccccctatcggcggtcgctaagctcagccagttccaagtcaacgcccggttatgtcgggcgtttgtttaaggataaacgtgatggcgttgtcaggcttaccgaaggcaagatataaaaaataaggaaaatcaatttattgattttcggccgttgaccacaaaggaggaaaaaccacgctttttcctcctttgtcagccgcctgacgcccggttatgccgggcgtttgcgttatcttggtttatcccgccagagttaggtacactacctccagttaagtaggcctgttgcggcctatcgccagatttacggaggctgttgttaccatggcacaggccaacctttctgaaattcttttcaagcccaaattcaaacaccctgaaacctcgacgctggtgctgcgcgcgcgcaacaaagtgagcgccgccatgcattccgcattggaaggcgacaccaccggcagctggtaccgcatgctgaacccgctgctgtgggcctggcgcggcgtcagcccgatcgaaatccacgaagtgctggcgcgcatcgccgcctccgacgccgagcgcagcaacccgcagcggctggataccgtggtgggctaccgcaacggcaactggatttacgagtggatccatcagggcatgcagtggcaacagcgggcgacggagcagcaggatccgctggtcggcggcgagtactggctgaaggccgcaagcctgtacagcatcgccggctacccgcacctgaagggcgacgaactggctgaacaggcggagatgctggctaaccgcgcgtacgaagaggcggcgctgctgctgccgtatcagctgaaagagctggagtttcgcatcgaaggcggcggcagcgtcaccgggttcctgcacatgccggagaagggcgaagcgccgttcccgacggtgctgatgtgcggcagcctcgatacgctgcagaccgactatcatcgcctgttccgcgactacctggcgccgcacggcatcgccatgctgacgctcgacatgccgtcgatcggctcctcctgcaaatggaagctgacgcaggactccagctacctgcaccagcaggtgctgatccagctggcctcggtgccgtgggtggatcatcagcgggtgagcgccttcggcttccgcttcggcgccaacgtggcggtgcgattggcctacctggagccgcagcggctgcgcggcgtagcctgcctggggccggtggtgcatcgcctgctgtgcgacagcagcacccagctgaacgtgccggacatgtatatggacgtgctggcgagccgcatgggcatggctaacgcctcggacaacgtgctgaaggtggagctgaacagctactcgctgaaaatgcaggggctgctggggcgccgttgcccgacaccgatgatctccggctactgggagcgcgatacgctcagcccgaaagaggagtcgcagctgatcgtcacctcctcggtgagcggcaagctgatcgctatcccgcgcaccccggtctacgacagcttccaccgggcgttgctacagatgtccggttggctgagggacaaaatgcgttaattagttgctaaattttaacagtttgttaaaaagagtggtctacattgaggaggtgagagaatgacgttaccgagtggtcaccctaaaagccgactaatgaaacgttttgccagcttggggccgtacctgcgtgaagggcaatgtgagaacgaccggtttttctttgattgtttggccgtctgcgtcaatgtaaagcccgctccggagaagcgcgagttctggggctggtggatggagctgcaggcggaagaggcgcgcttcacctattcgtaccaattcggcctgttcgacaaggaaggcgactggacggcgcaaaacattaaggatgatgaagtgaacgccaagctggaagacaccctgcgcgacttccatcgccgcctgggcgagctgctggcgaccatggagctggggctggaacccgccgacgatttcaaagaaaaactgatcaaactctccgcctgaccccgtttgaccacgtattgtgctgatttcgcgttgtgcctgttggcataacgcgtctctcctgttacaaagacctttgcactcttcttctcatcattacacacggcagaaatactatgaacggcagccagacattggttgtgaaattgggcaccagcgtgttgaccggcggatcgctgcgtctgaaccgcgcccacatcgtcgaattggtgcgccagtgcgcgcagcaacacgccgcgggccaccgcatcgtcatcgtcacctccggcgccatcgccgccgggcgcgagcacctgggctatcccgagctgcccgccaccatcgcctccaagcagctgctggcggcggtagggcagagccggctgatccagctgtgggaacagctgttctccatttacggcatccacgtcgggcagatgctgctgacgcgcgccgatctggaagaccgcgagcgcttcctcaacgcgcgcgacaccatgacggcgctgctggacaaccgcatcgtgccggtaatcaatgagaacgacgccgtcgccaccgccgaaatcaaagtgggcgacaacgataacctgtcggcgctggcggccattctggccggggccgataaactgctgctgctgaccgatcagcagggcctctacaccgccgatccgcgcaacaacccgcaggccgaactgatccgtgaagtgcacggcatcgacgacgcgctgcgcgccatcgccggcgacagcgtctccggtctgggcaccggcggcatgggcaccaagctgcaggcggccgacgtggcctgccgcgccggcatcgacgtggtgatcgccgccggcagcaagccgggcgtggtggcggacgtgatcgagggcaaaccggtgggcacccgtttccacgcgctggaaaccccgctggaaaaccgcaagcgctggatcttcggcgcgccgccggccggtgagatcaccgtcgacgacggtgcggtggaagcgatgatggcgcgcggcagctcgctgctgccgaaaggcatccgcgaagtgaagggcgacttctcgcgcggcgaagtgatccgcatccgcaacctggcggggcgcgatctggcgcacggcgttagccgctataacagcgatgcgatgcgcatgatcgccgggcaccactcgcaggaaatcagcgagatcctcggttacgaatacggtccggtagcagtgcaccgcgacgatatgattgtcagttaaggagtgagcatgctggagcagatggggaaggccgccaagcaggcctcctggcagctggcggtgctgagcacggcgaagaagaatcaggtgctgtcggtgatggccgacaggctggaagccaacagcgaagcgatcctgctggcgaacgaacaagacatggcgcaggcgcgcgccaccggcatgagcgaagcgctgctcgatcgcctgctgttgaccccggcgcggctggcggcgatcgccaacgacgtgcgccaggtgtgccgcctgaacgatccggtcggccatgtgctggacggcaacctgctggacagcgggctgaagctggagcgccgccgggtgccgctcggcgtgatcggcgtgatttacgaggcgcggccgaacgtcaccatcgacgtcgccagcctgtgcctgaaaaccggcaatgcggtgatcctgcgcggcggtaaagagacgcacaacaccaaccaggcgacggtgaaagtgatccagcaggcgctggaacagtgcggcctgccggcggcggcggtgcaggcgatcgacagcccggatcgcgcgctggtgaacgaactgctgcgcctggatcgctatgtcgacatgctgatcccgcgcggcggtgccggcctgcacaagctgtgccgcgagcaatcgaccatcccggtgatcaccggcggcatcggcgtgtgtcacacctacgtggatgccgacgtcgatttcgacaaggcgctgacggtgattgaaaacgccaagatccagcgcccgagcgcctgtaactcgctggagacgctgctggtgaaccgcagcatcgccgccgagttcctgccggcgctgagcgccaaaatggcggcggcgggcgtgacgctgcacgcggcggaaaatgcgctgccgttgctgcagggcggcccggcgacggtggtgccggtgaacgcagaagattacgacgacgaatggctgtcgctggatctgaacgtgctgctggtggacgatatcgatcaggccatcgaccacatccgcacccacggcaccaaccactccgacgcgatcctcacccgctcgctgagcagcgccgagcacttcgtgcgcgcggtggactcctcggcggtgtacgtcaacgccagcacccgcttcaccgacggcggccagttcggcttgggcgcggaagtggcggtgagcacccagaaactgcacgcccgcggcccgatgggcctggacgcgctgactacctacaaatggatcggctacggcgacgatctggtgcgtagctagggtcggattgcggtcataaagaggtcagggcgcagcatgctgcgccctgattgtttttgtaaacgggactgcacgacagtctggttgcttgtaaaacgaccaaacgccccggcggctcttgactcatttcgcgcgcaggtctaccttgttcaacgcacttccggcttgccccgcaggcccggctcgatgccgatatagctcagttggtagagcagcgcattcgtaatgcgaaggtcgtaggttcgactcctattatcggcaccatcctctcttcctgcaatttccgtattcatccataagtactctgttttataaaagtatttttgattttttaatccgtattagtccgtaatgttccagtggaatccggtctctaatgtgtataggattgtgtatatgttcctgttcggtcttggattcctatacacatgcctttaaacgatatgcagattcgccgcgctaagcctgaagctaaagcctatacacttggagatgggcaagggctgtcattgcttatagaacctaatggaagcaagagctggcggttccgctatcgctatgccggtaaacccaaaatgatctcgcttggcgtctacccaacgatcacattagcagatgctcgttctcgccgtgatgaagctcgaaaacttgtggtagaaggaaagaatcctagtgaggttcgaaaagagcaaaagttagctctgcaaacagagtcagagaacgctttcgaaaagatagccagagagtggcaccagcttaagtctgccaaatggtcggcaggatatgcctcagatatcatggaagcgtttaagaacgacatttttccttatgtgggtgcaaggccagtaggagagattaaaccgttagagctattgaacgtactgcgtaaaattgagaaacgtggcgctttagagaaaatgcgcaaagtgcgacagcgctgttcggaagtttttcgctatgccatagctaccggaagagctgagtttaatcctgcggcagatctctccagtgctctcgaagtacatcaatccaatcacttcccgttcctaaaagctaatgaaatacccgattttctgcgtgctttagagagttacacagggagtcgggttgtccagattgctactaaattactgatgattacgggggtaagaaccattgaactacgtgcagcatcatggtcggaatttgatctagataatgctatttgggaaattcctgctgaaaggatgaaaatgcgtaggccgcatcttgtgcccttatcgactcaggcgttacatttactcaatgaactcgtggtaatgacagggaactatcgttatgttttcccgggtcggaatgatcctaacaaacctatgagtgaagcgagtataaatcaagtgattaaacgtatcggttatggtgggagagtgactggtcatggtttcaggcattcattgtctacgattttacatgaacagggctatgagtctgcgtggatagagacgcagttagcacatgttgataaaaatagtattcgtggtgcttacaaccatgcacaatatatttctcaaagggggttaatgcttcaatggtattccgattttatcattaaataacaatgaggatgtgatatgaaacaatctcggagacatcattatgtacctgaatggtatcagcgtaggttcattccgaaaggcgatacgtcatattacagattagatttacatcctgacttaataacaaccccacaaggtgatgttattcgcaaaggtgaaatcctacgaaaggggcctgcaaagttttttcatcaaatagatctatatacaacaaagtattttggtgtcgaaagcgatgatattgaaagatatttatttggtgaaatagactctaagggtgctttggcgctcgctgttctttccgccgatgattggataggtaaaatacatgatcatgttataaatttttatgaatatattgatgctcaaagattgagaaccccaaaaggacttaattggttaactaaggaatttaatccaagaaatcaaaatgaattattaatgaggatgcagtatgttcgtaaaatgcactgtactatgtgggctgaagcttctttggaaatcgtcagtgccaaaaaatcctcagtcaagttcatagtaagcgacaaccctgttactttttataaccctgaagtatatccagggaatgttttatgcaaatatccatttgatccttccttgactttacaaggaactagaacgatatttcctctcgactcagaatattgcattattatcactcataagcaatttgctcgaaaacctggaaaattcaaagcattaaaacctagaataaatgctagatactttgattcaactgttataaattatcatgattttattcgtgaacgctatttcaccgaaaagatggtagcttcagtgaattttatacttaaaacacgagctgagcgctatatagctgcatcaaatcctgaatggttatatccggagaaagtgttaaaaagtactgactgggcttcttttgataaaatattcatatctaaaagcatcaagttattaggtgataatgtggagattttttttggtggtgaaaatggagagttgattgccacacaagatgaatacggacggaagcctaagaatcggcaagaatgggaagaaaaagaaaaacaagcacaagctatgcatgaacatattttacggcttttgaaaaaacatcgaagtgaaggtaaatgaaggagagttcagatacctttataaatgactatgttttgaatatttcaccatatttatatatcaagtttatgctttaatggaacatctcttgatattacaataggatagtcatccctattttgcttctgttcccaatggatagcaagtgataagtatatgattgatcttctaaccaatcttataagtagcattagtctcgcttcgaaatcacgctcactaatcattaatgaatgcttagagcgcttagttttgtcatttatcttaattttagaaagtgttatttttttaactaattcatcccttttatctattaagatgtttagttttgtctgattattattttctttatgtgttttaatctctttgcaaataaccttaatttcactatcgagagattctagattgtttttttcttctgcatagatcttttcatgattattactgtcattatttaatagtttatagccaaaattatcaattatctttaatgacctatgctcaattgcatttctgattttagaaaatttttccgcatctggatctaaccaataggactcactgtctaagttgccatctttatggtttgaatctcttatatcttttagtatgtagaacagtgcgtgtagaaactgattattgctctcttttaactttgagtggggtttcagttttccattttcaaatttaccaaaaaaattgtgaaagtaaatttttgcatcaatatcattgaaatcatagaatgagttaagaaaatatgcaattttatcaaatattgaataaagagttttaaaagcggatttataatgttgtgatttaagattggttatggcatgagacatgtcgtcgatgtgttgatatgtattgttatagaagtgaatgttttcgctgggtatattgtgcgcactaaaaatcaaataacgtgcatatatataatcgttttttatttcatcaaaattaccatggtaaactaaatcttcgcacattgttaatgtttgattaataattgcagtgtgacttggtaaggttatgcagtcagtgtatactagttccgttgtatattcatcatttagttcattgaggaataatctattgtctccgcaccacttcaaataattatattgctttttggtttcaaaattctctttgtagttatcaatggaattaaagtctgattcgttgaagtttttttcgaaccagtttttgaatttaatcaagctcccatccttactatatgctgaggctagttctggatctagcgtgctgattccattcagccctgcgcatatcgatttataagcttcatagtaatgatagtaggaatggccttcatcatacaaaaaaccagccaactctatgttattatatgcttttcttattattgcgacagggttgttatctaggtttattgccatttcccaatgatttttacaacaaagaagacgaccttgtgaacataagtaattacctaggtttgtttctatgcgactttttagattagctatgtattttttcgtgttatctatgttttgtaatgcatttagggcttttctgtaatttattactgattttccaagttcttctgaataccaagttgtatttgttttattaaagacggcagattgacaattagcaatggtgtagtaataccttgatttgattatttcatttgaaaaaatatagtttggattttctatcgcatttataaatcccaaaatatcatgcgttaaattagctgaaatcacttcatctgcacgcatttcaaaaagtgctatagcagcgtcgtctagtaatatagatggtgtttgttctgacatgttaacttctccacaaccattttatcattttacagataatgggttttttaattggtatgcagcgagttatgaatcctagggtatatacatatcttatgtctgtcttgcgcgcaatacttcccccgcctcgcctgcgcacttcatgtgtcgcttttcatgcagttgcatgaacggccgcaggccgcgccagtactggtgctggcggggatgaaaagtgcattttcttgcatgcaaaatcatgcaccctatgcatgcacgcgcaatttgaggctggctagccaggaaaaaggctgttttgggcgaggcggaaggggaattgccccgcggtgctgttaagagcggcggggcggagtgtgattagtgcagggtaggattgctgttgtagcggcgatagcggttcaacgtccgtttctccggtggtggcaaggtgttctcatcgaccggttgcgcctgtatcggctggcacaggattttatcgacgctttccaccgtcttgaatgtgcaagaacaggtcaggctctgacattggtaatacgcctcttttgtccgttccgtgatatagcgactggtgcgagtataggacgcatgggtgcacagcgggcagcgcatcatgattgagcccctttctcttgcaacagacggcgtttttccgccagttctcttgccacttgcgtccggcgaattgggctgctttgcagttccggcaatacgcccgtttcttgcgatatcgtcaggccaatctcattaagtaccgggtggtcgatattttgcgtagccatggtagcgcgaatgcggccttgtagcgtgcccagtacctgttgctcaatcattctcatcggattgtccgcatagacgccgtaagcccgtgaggccagtgcgcacgccttgataacgtcagggctgataagcgccttgctcagcgcatccacggcctgacgcatcgcgtgagctgcaaaggtcgtgagggcgtctttgtgcgcgtccaccaccttcggggccgtgccgccgcagttggggtgaagctgcattttgtccagctccatctcctcaatcaggccgtcgaactctttcgccagctcccgcttggaaatccgactgtggtgttgcgcttgcagttccggcgtcatttctccgcgcagtttgcgaaacagggtgcgccactggctttctgcctcctggctctgcacttcggtgtctttcttctgttggtggcagcgggcaatgcctgtcacgacgtcggtcaatgcctggtagtttttgtcgtgggcggcgcgagcgtcacgcagggcttgcagtgtatcggtgatgtatttcggtaaggcggtggtgctcacggtcatgtctccggtgtcagtcaatgtgaagctattctgctgaccgccgtacaacatcgccattcatcccggttggactatccccaggacaacagccttgggcgctgatgagaaaaccatcaagccgtttttagttttacctaaaactattcactactgttcacctaaagaaaaaatatagataaatcagtaaataatagggtgaacacttctcgctaaactcttcacccggtgttcaccactattcacccagtccaaaatagccttttccctggctagcggtggttagtctgtttatacctatttattagcaatgaattcattgttgaaaactatggggtaatgttgaggaagggtgaggagtagtgaggattgctgagctattataatttgttgtttttataaccatttcttgacgggccacacaacaacaccttgttgccaccccggtaaatattcacataatagggcgctaccgaagttcacacagtcccggccagcgttggccggacacaaagaggtagcgttttatgttgaccgtttccaccccatccacccgatccacccagtcgccagtgctccctggcggttacatcccgcgcgagcgctttatccgtctacctgaagtgctctataccaccggcctgtcccgctccaccgtgtacgagatgatgagccgccggcagttcccggctcaggtctcgctcggcggtaaaaacgtcgcctggctggcctccgaggtcgagcagtggatggacgagcgtatcgccaaccgtcaccagggggctgccgcatgatgcaattaacctttggtcgccagcactttaccctgagcgacaacgacgcactgtttatcgctgaggccatcctgttacaacgtaaagagcctggcgtcgtcttgccggagcaccgcagtgaaaaacacggcgttattcgtctggcgagttgccaggccgagccgcgcctgttccgagccgggccggtgccgctgacctgcgcgcctgctgatacccgcaacgacccgcttaccgactgttgatcactatgcgatcgattgaacatccgggggtgtcttacggcttgcccccacgtccggccctgcgctatagtcctcccgctgccgcaaaatcggcagccgggcgtaggaacccgtgtttaatcttggcgacaaatgaacacgcgccacgcgtgtttttttatgtcacagccttagtgcgctcattttttgcgcggtggatgttatgctaccgcagcagtcaatcaatggtggctcaggcggggcagccttcgggctggccggtttccaaggttgccggtattcctacccccgtctgggctaccaccattgagtgtaggaactccggtggtagcggtaattcgctaaccttggaggctgccgttatggctacgaccctcaccccgactcactcgacattctgctttctgtttgcggccgtgcgccgttctgcgctgacggcttcaccgcgtatggtgcgcaccgtggcggatagcgaacgcaatgcccgccgcgtgctggcccgtgattacgtgttgtcctttgccggtcgtctgccggttaaggcggcagcatgaacaccctggccgaccgctactaccgcgatacccattatcctatcccgcatgccgattttctgcgtctccagcatgcgcacgccaccggcgtgctgttcctcgacctgctggacaccctcgacctcggcgggcagcgccccgacgccgcgcaacaagcatcgtttgcttcggtcattgccctgctgaccgaccagctcggccacgtcgtcaacacctgtgaatcccaaatccttgcccgcatggaggccaccgccgcatgaacactgcatcctgtttaccgattgaagtccgtaccgccgttttccgccgcgccgtggcgcaggcctatctggatacctgcgccttttaccgggtgagcctcggatacacgctggacgagctgcagatgacgattgccctgcgcctggaggggcactttgttcgtcagtacggcgcagaagacggcatggatatggcgtgcaccatgctgagtgacatggtgcagccggacgttctggtggccgcgccgcgcctgaccgcgctggggcaaaaggtgatggacgagctgtgctgcgagcgcctgtcggcggcacagaacgcgaccgtacactgaggagaagagcatgagcgcccagttcgtttcccagaccgtacgcaccgccaccggccactggccggtgatactcccggccctcggcatcgccttgcagccgaacggcaaaccgcagccgtgtccgacctgcggcggtaaagaccgcttccgtttcgacaaccaggacggacgcggtacctggttctgcaatcagtgcggggccggtgacggcctcaacctggtggaaaaggccctgtcgctgtctgcccgggccgccgccgaacaggtggctgccgtgatgggggaaaacgccaacgccctgccaccggccgctgaggcccgccatgccttactgaagggcggcgggcaagacaaggccgaggcccagcgcaaggccgcgcgacaggcccaggctctggtgactgccgcgcaacctcagaccggcaatgcctacctgagcgccaaaggctggccggaggtggacaccctgaccttgcagggccagccgctgcgcgttggcggtatcaccttccagcccggcgacctgctgctgccgctgcataatgccgggggagaagtggttaacgtgcaactgattaacgccaacggggacaaacgcatgctggcaggcgggcaggtgaaagccgcctgccatactctgagcggcccggacaatgcggttatctggctcaccgaaggctacgccaccggcctcaccgtgcaccgcttgaccggtgaaacggtgtgcgtggcgctcagcgccaacaacctggcggccgtggcagagcagctgcgcagccactacccggacgcgcggctactgctggcggctgataatgaccgctgcggcaccgggcagacccgcgccgccgaggcggccacactcaccggcggtatcccggcactgccgccctcggaaggcgactggaacgacgtttatggccgggaaggggccgaggccacgcgcgcacagttccaggcgttcagccagccgtcgcagcccagcccgttcgacacactgagcgatgccgacctgaaagccatgagcgccagcgagaaagccgagctgctggccgagcactatggcaacaccctggcggtgccaccggtgggggaagagctgtgccgctatacccgcggcgcctggcaggtgctgccacatcggcaactgagccgggagattgccgcgctgttccagaaggtacgcgcgccgttctccgccgccggtatcaacagcattttggataccctcaagctgatggtgccgcagatgggcgagcctgcccgccggttgattggctttcgtaacggggtgtttgataccgtcagcggccagttcagcgctcaccggcaagagcactggctgcgcaccgtcaacagcgtggactacaccccgccgcgtgccggtgagaacctggccgaccatgcaccgcacttctggcagtggctgacgcgggccgccgggggcaatcacgacaagcaggaacgtattctggcggcactctttatggtgctggctaaccgctacgactggcagctgttcctcgaagtgactggcccgggcggcagcggcaagagcctaatggcagccatcgcccggctgttggcaggtagtgataacaccacctccgccaccatcgataacctggagtcggcgcgcgagcgggccagcgtggtcggttactcgctgattattctgcccgaccaggagaagtggagcggtgacggggcgggtatcaaggccatcaccggcggcgatgcggtcgccatcgacccgaaataccgcgacgcctacgcggcgcacattccggcggtgattttggcggtgaacaacaacccgatgcagttcagcgaccgcagcggcggcatctcgcgccgccgcgttattttgccgttcccggaagctatcgcccccgaagagcgcgacccgttgctattggcgaagatcaccgaagagctggccgtgattgtgcgtcacctgatgcaacgcttcgccaacccgaatgacgcgcgtgcactgctccaggcgcagcagagttcggcggaagccctggaaatcaaacggcatgccgatccgctggttgatttttgcggttacctgacggtgctgggcaccccggaaggcatgatgatcggcaatgccaacattaccccgccgaacccgcgccgctacctatatcacgcctacctgtcgtttatggccgctagaggttatcagcacgtgatgaacctgacggcgttcggccaggcggtgccgcagacactgaaagagtacgaacacacgttgctgaaacgccgtaccaagcagggaatacagaccaacttgaaattgagtgacgagtgcgaagcggactggctgccgaaatgctgtgctgtgtgacgatgagcgggtcgatcggccgggccgatcaataggccattattgatctgccgaacccattggacgctcaatcgccgcgccgcctatagtggcagtgacccaaacacacgcagcaacaccagggcatcctatcggccgcggaacggtcaatatcataacgacaagcgctcaccaaaccggctcaggccggtttttttgttcctacggttcagacggttcactctgcaggtgaacaggggggcatcgagaaggtagctatacatccatcaatgcattgaaacataaagataaaaatatgtattggaagaacggttttcctctaacccttctaaaacctagtaaaatcatgatgcatttaagtgagtagaagccaaagtcggaactgagcgaatatgagtgtgtatgactgctttttcgctgggaatctacgcacgtacgagtcaacgatgaagatacgttgtatcgagttagagatgggcttgtgatataaaactgtggctaaacgcctccttcttctcttcctcttcgacttacggcaagcgatacaaaaacagaggcgattgtataattcaagaaagctttttcgttggcgcataaaagatatcggttgactgagcggattaccagtaaacaggtatcatgaatcaaaaggaataattggagatttgatctttttaccataagtatgttgctgactaatcatcccctacaattcttaattgctggtaatctgctgtgctcttattaacttgttgatttaattttatattctccctgaaccttacaagcaccgtctccgctgatatccaaatatcttcacgtggcttattcattttgcgaaacatcgtaggggaaacaccatagtgacatttaaatactcggcagaaggcctgttgttcttggtagccgtattcaagtgcaatatctatgatttttctatctgtagataaaataactttcgccgcttctgtcatttttcttgctctgatataagatttcatcgatatcccggctaaagagcaaaatttacgttgcacataccatctggaatatccagttttatcaataaggttgatgatatttacaggctttttaatgtacgtctccaataaattaatgacactatgaataaatattttagattgttccattttgcttatatccattgcactgactccttatgtctctacctattgacgcgatctaaatctcgattattgcttaattctgtcaagatgatatcaattttttcttttttatttcacaccaatgatatggctcatctaactttttgaaatttaatgctattatttttttctgttgcacttatctttgagtgaagtcatcctaactttatttttaatgcaccaatatgtactatctctgttttttgtttaatttttaaataaaaaagtgctaagctttattatatcgatttttacttgattggcgtgactgaatagcaggttagtatatggaagaaaaaagaattttaatcattgaggacgatatgcatgttgcagaggtcctggaggcttatctaaaaagagagtgctttaccgttgccaaagtaggtgatggtgttaaggggctcgagatggctttctcttggcaacctgacttgatcttattggatgtcatgctgccaggaataagtggtaatgaaatactggcacgtgtgcgcagaaagagcgatgtgccggtcatcatggtgactgcaatcggtgaaatacaagataagatttcctcgttgaggcatggagtagacgattatatagtgaaaccttacaatccgggagaggtagttgctcgggttcatgcggtgctgagaagagcgagcacattgaatataaaatccgacctcattatttgtggtccggtacaacttgatgaagaggcgaaattagttcacgtctgccccgcagaaaatattaaaattgcagtggagcttacaccgactgaatttttattattatctgttttgatgcgtgcgcctaaaagagcattttctcgacaaacattgttgaatatgtgtttgcctgagagtgatgcatttgaacgggttgtcgatacgcatatttataatttgcgcaagaagctcaattcggtaggggtgaacgacgttctactaaccgttagagcgacgggatataggtattggaataaatgaacaaaggaaacaagagagcctcactttggaagtgggtctgtgtgagagttatttctcaatctatcggcgtggttgttattatcgcactctgtatgtggctgcggtatgccatttatagtgcatgggttttatatcatgaaatgccggcagatgtccgaaaggagttcctgcgattgcttgataaccctaatgaagatttatatagattttacagcctttttcactattggtatggcattgattttgctaatccttcgatcacttcgggggattggatcatgttgggtattctggttgttgtcgctattcctctaatggtcctactggggctttatatgtcacggccgttggcaaagcaattttcatatctggtaacagctgcgagaaaagtcgccgagggggacttctctgtgcaagcaaaattagaagagaaagcaccggaagaacttctgactctaactcacgatttcaatgagatgaccaaaaagcttacttactatgaaggggagcttcgcgcttctcatattgccatggcacatgaattacgttcaccattaacagcttcaatcgtgcggcttcagggaattatggatggtgtttttgagccggataagcatcaattgaatttggtcatgcagccattgaaaagccttaatcgacttattgacgatcttcaaatgttgtcgttgtcacaagccggggcgttatcactagagaaatataatgtgaatctgtgtgatttaattcaggagcgtttgcaatggctaaaggctgaggtctctcaggaggattttattattgaatttgaaagtactgactccgtatttgtttatgccgacccgttccgaattgggcaagttattacgattctcataaaaaatgcattgcgctatgctcattccggcaaaaaactgacaatcaccataaatcattctaatgatgaggttgtcgtcggttttcgcgattatggaccgggcgtcaatgaagcgtttttaccattgatgttcgaacgtttttcgcgggaagaaagttcgcgatctagaaatctaggcgggagtgggcttggtctttccatcgctatggcgataagccgggagcacgatggcagtctcagtgctcagaatcatcctgacggtgggatgctatttctactaattcttccaatgaaaatagagtcttgatgatttgttgaaaaagcgtggactaaatctacacataaaaaaggtttaattcttcgacagactatcaggagaatgtcttatgtcagtaggtttgttcaggttaataagtgcggtcaagggcgtattcctatttcaatactggaaacttttcattattcccctatttgtgttattggcggggtgtgatgataaagcaaagacagaggaggtgcctacacgctccgtacgaacgcttgtcgtcgataacccggttggtggagttttgataaagcacaccggagaaattcgtcctcatgaagaatctcagctctcgtttcgtattgatggtcggatcctaagccggccggtcgatgtgggagataaattaaaggcgggacaaacgatcgcgactttggagcctagaaataacgagaatcaagtgcgtagtgcgcaagcagagctggctggagctgtttctgcagaacgcttggctgctcttaatttcaaaaggttacaatcattgatcaaaaccggcgctatcgcgcaggctcaggttgatgaggctaaggtcaatcttgaagtcgctgcggcaaaacgcgtctctgctcaatcgaatttgaaaatcgctcaggagcaattgggttacacccgtctagttgcgccgtcggatggcgtagtgacttcggttaacctgaaccctggccaaactgtcagtgcagggcagggggtcgttacgctctcactcaatgagggtgtggatgccgtatttgacgttccagaagctattttgtacagcgatcttcccgataataaagtcaagattgcgctgctttccgatccttccgtcgtgactgagggtgtgatcagagatgtgaatccacaggcggataagcagacgcgaacctggcgagtgagagtctcgctagcacacccgccggagaaaatggctttgggatcgacggtgcagggaagtatcgttattccggggcaagcagcgtttgttttgccggcatctgcgatgacccgtgatggcgcggatcctgccgttctaattgttcaaccggatacatcaaccttggcgttgcgcaaagttaacgttattcgttatagctccgaggatgtgtttatttctgatgggctcaaacctggcgacaaggttgtgatcgctggtgtgagcaagttacggcctggcgagaaagtaagtttggaggataaattctgatgaatgcctctgaacccaagaagtttaacctgtctgcctgggcgcttgccaatcagcaacttgttgccttttttatgttggttatcaccattgccggggtgatgagctattacaacttgccgcgcaacgaggatccggcgtttaccattaaaacggcggtggtttccgcgagttggcctggggcctccgtggaagataccgtcaattttgtgactgatccgttggagaaaaaacttcaggaagttccttatcttgattatttggagagttatagccggcctggcgagtcggttatctttatctatctgcgtgataatactccgcctgagaaagtgaaggaactgtggtatacggtcaggaaaaaaataaaggacgtttcccctcagcttcctgctggcgtcacttcacctgctgtcaacgatgaatttgatgatacctacgggaccatctatggctttacgcgtgaaggattcagcgagcgtgaactgcgcgatctggtggacaaagttcgcacgaacgtcttaacgctgccggatgttgggaaggtgaacctgctgggcgtaaaagaagagcaggtcatcttatcattctcaccgcagaaaatagcgggtatggggctgacgcttgaccaaatcaagaacgccatcagcgcgcaaaatgccgtgactccggcgggagaaataagaaccgacaaagacaaagttatgttgagggtcagtggtgctttcgcatcggaagaaagcctcaaacagctgacactgcatattcaggatagattcgttcctctgacggatattgcgaccatctctcgcgaggcggtcgatccgccgacgccggccttcagggttaatggggagtcggcgattggtttggccatttccatggccccgaccggcaatatgctggatttcggtaaagcgcttaacgaaaagatggatgatatatccagccgcttgcctgcaggtatcaacgtgctgaaagtggccgatcaatcgacggtggtgcatgacgcggtagggagctttatgaaagtgctccttgaggcggtcgtcattgtgctggctgtttctttcctatcactaggcacccgtgccgggttagtggtcgcagcatccattccgctggtgctggccatgacatttatcggtatggaaattgccggcatcggtatacagcgtatttccctcggtgcattaattattgcgctggggttgctggtcgatgatgccatgatcactgtagagatcatgatgtcgcgcctggaaaaaggagaccctgtcaaaaaggcggcgacaaaagcttggacgacgacggctttcccgatgctgaccggcacattggtcatgattgccggttttatcccggtcggtttcgcaacgtcgagtgcgggggagtactgttattctctgttcatggtggtgctgatttcactcatcaactcctggattgttgccgtacttttttcaccgctgataggcgtgtggcttttacctaaggtgatgaaggaacacacccacggtaaaggtaaagtcatgcaaaagtacgaaagtgcattgcgatatatccttaagcgccgagggatgaccggcatcgtggcggttctgttactggccattgcttttatcggatcctcgcacatggaagaggagttctttcccgcttctgacaggccggagctactcgtcagtctgactctgccgagaaatgccgtgcaggaagatacggcgagggaagccattcgcttggaggaaatcctcaagaaggatcccgatattgatcattttacgacgtatgttggatcgggtgccgtgcggttttatttgccaatggacctgttgcttgataacgaaaatatcgctcaattggttgtggtcaccaagggacttgaagagcgtgacgccgtgaaggccaggcttgaaaaaattctgcaaaaagatttcggccatcttgttacgcgtgcgtcgccgttggagctgggtcccccggtaggttggccattgaaatatcgcgtttccggcccggatctgaccaaaatccgtgagatatccatggagttggcggggaaattgggtgacaacccgcagacaagagaggtcaaccttactgcgggagaaccgcaacgagaactctatataacgcttaatcagacggaagcgagggccttgggattaagctctcaggatgttgcaagtgctcttgctgaaatgtattcggggtccgctgtaacgacgatcagagacagaaatcgccaggttaacgttgtgctgcgagcttcagaaaatacgcggcgagacattgaaaccgtcgcggacttgcaattaacgacggctgatggacgcgttgtgccgttgaaacagattgcaactataggctatacgttggctgaacctattcagtggaggcggcaacgagagcctttcattacggtacaaacggatattgcgccagggttgaatgcgtccggtgtgtctaaagatttggcgcctgttgtcgatgaattacgcaaaagtttgccaccgggataccatattaccgagggcggaagcgtcgttgaagctatgaaaggcaaccgttcagtgttcgccgttctaccagtgaccttattggtgatgctcatcttgctcatggtgcagttgcgtagtttctcacgcatgatgttggcgctgttgattgcccccttcggtttgattggcgttgttgctgctatgttacccaccggaacgccaatggggtttgtcgcgattcttggcgtgattgcgttggcggggatgattatccgcaatgccgtgatccttattgaagaagtggaaataaacagagcacaaggcgcagataatactgaagcgattgtcgaggcggcactgcatcgttccagaccgatactcttgacggcttgtgcagcaatattagggatgatacctatcgcgcaccaagtattttggggacctatggcctatgccattattggtgggttattagtggccactttatttaccctgacggtattgccagcggccatcagcgccgttctgcaatgggaaacgtctcgatagaacttacccctcggagataactccgggggagtcttaaaaaggaggtgggcagatgtttgagttatttaaacttattgggttagggttggttttgttgctgccgctagtgaatccattgaccactgtggctctttttcttggactgtcaggcgacatgtctgaacaagaaaaaaagaagcagtcagccatggcggctttttatgtctttgtgattatgatggttgcgtggtatgccggtaaagctgttattaacacctttggtatatccattccgggattaagaattgcaggtggaatgatcgttgcgtttatcggttttaacatgttgtttccacaggatgttaataagtctcaaggcagtgagaaggaaaaaacaaaaaatatagcgtttatcccattagcaatgcccagtacggcaggtccgggtactattgctatgttgatcagtgccgcatcgacattcagcgctgaaacatcgcatctggatttgtgggtcgcatatatcgctcctcctctgattgcgatagccatttctttgattttatgggtgtctcttcgggcgtcactgggtgttatgaagcttgtaggtacatcgggaatcgatgctatttccagagtcatgggattcctgcttgtttgtatgggggtacagtttgttataaatggagtcgttgaactcgtcacaatgcaataaacgcgatcgcttcagcggctgaggtgcatggtactgcacatctcagaagagaataatatctgaaaacttatgtctatatcagttctgagaatgtacttatattcttggttatcatggctgccataaagatcatgaacaatgccgtgaactcaggcggtgataactgtcgacatgctgcgattatttatcgaaaagttcccaccttgtttgggaacttttttttactttttattctgctctggtgcgtcgtcaacggctgtgggtgttattatatctgccggttgaaaatatgccgtatactattgtggggcttggtaagatggcatgccgcgcttatatacaggcccactccaggctccgcctgacattctgatgttctactgcggcattctccgttgatgagatcgtcagagggttcaatccagtggtgaaattagggctacttagtgcgccaagtgcagaaggcggcattgcgactgccgccttctgcaccgacgcactctgatcttttgattagcatcgccttcgttcagcgagacaacactttggcgatagcctgggcttcctgctgccacccctgcgccagagtgcgcaccagggcatcatagccgtcttcaccctgtttcagctccaggctgaaaggccttttgatcaaacgcccctggcggttcagcacccactcgccgcgaatgatcgctttcccgtcaaagcggccgtggaagccgctgatggtcacgttcagcacatcctgatcgctgctcatcggctgcgaagagaccacccaccccggcagcgcgctgctcaggttggtgaccagcgtttgctgcagctgctgatcgagcgggctggcccacaggttgttctgggctatcacatactgcacgtcgttggtctgatacaccacgccgctctgcgccagataatccgccacgctcacgtgctccagccacagctggcgcgtggaggcgccgctgctgccggccgcggccggcgcgcccagcgccggcaactgatagtaagtcttctgtggcgaactgctgcaggcgctgagcaacagcgccagggctaccgggatccatttcatcatttcgtggccttcttcggctgagggtcattgctgccggcggcttcaaacaccagcgcgttgctcttctcattcagggtgcgcaacaccggttgcagctcacgcaagacctgatcgaggcgctgcatgtcgcccaccatcttgttgtaagccggtgaaccaggctggaaccctttcatgctgcggttcagctccagcagcgttttctgcatgtcctgcggcagcgcctgcatctctttgctggcgatgatgtcgttcaacgacttcatggtctgctgcgtcgacttcatggttttctggctttccgccagcgtcttggtcgcttcgctgatcatcggattgatcggcatcgaattaatcttatccaacgtctgcatcagtttctgctggatctgcgccagaccgccgctggtggtcggcatcagcggataaccgaacagctcgcgcggccctttccacggtttttcctgcggatagaagtcgagatcgatgtatagcgaaccggtcagcaggttggcggacttcatcgaggcgcgcatgccgcgggattccgcatcttttaagtgcccttcaatatcgacgttgtcccccagttgtttatgaagccgatcgggttcgatgcggatcaacaccggaatgcggtaatcgttatccagacgctgcgccatgccctctttatagaacggcacctgcgccaccgtccccagacggatgccgcggaactcgaccggcgcgcccggctgcaggccgcgtaccgagtcggagaagaacagcaggtagtctttatgcacggtatacagcgaatcctgcgtgctgcgctggttgtcgaacagccggtactccgctttctctttcgcctgttcgccgcgatcccagccgtccggcacatcgaagctgacgccgccgctgaacagcgtggtcaacgagcccatctccacccgcatgccctgtgccgacatgtcaaacgctacgccgctgtctttccagaagcgcacgttggtggtgaccaactgatcgtaaggcgcggtgatgaacagctgatagcgcatggcgcgcgctttaggatcgaagtagctgctctccaccgatccgacgcgatagccgcggaacagcaccggatcgccggcgttgagctggcctgacttctcgctgtccagcacgatgcgcaaccctttggcatccggggaggccagcggcggcgcatcgagcagctgatagttgtctttgctgtctttgcctttgttgcccggctgcagttcgatataggcgccggagagcagcgtgcccagcccggagacgccttcacggccgatctgcggcttcaccacccagaaggcggaatcctggcgcagcaatttttccatgccggaattgaggcgagcctgcaccatcaccttgctcaggtcatcgctcaacgtgacggtttccaccacgccgacgtcaacgctgcggcttttgattttggttttacccgcttccagcccttccgccgtcgaggtcaccagcgtcaccaccggcccctgatggctgaagtggtaaaacaggatccaggcgccgatcagcgcggtcacgatgggaatgatccacaccggcgaccagcgtttgatcttctcgacgtccgcgacgctatgattattttccgtcaccttgcggctccttgttgattgtttcacttgcacgatcccaggtcagccggggatcaaatgtcatggcggcgaacatggtgaggatcaccaccagcgcgaacagcacggcgcccgtcgcgggataaatgctcatcaactgccccattcgcaccaacgccgacaacacggcgatcacaaacacgtcgatcattgaccaacggccaacgaattcgaccacttcataaatcagatgcatacgctcgctgtcggcgcgcggtttcttcctgccgttcgcatcccagcacagccagccgatcgccaacattttcagcgacggcaccatgatactggcgatgaaaatcaccatcgccaccggataagagccgtccccccacagcaggatcacccccgccatgatggtggagttcatcttgttgcccagcgcctcggtcaccatgatcggcatcaggttggccggaatatacagcatgacagaggtcaccagcagcgccagcgtccactgcaggctgtgacgacgccgcacgtagcccttggtgtgacagcgcggacagcgcacctgatcggccggcaggatcgccgtgcagcacgcgcaggagcgcacgccctggcgcatgccggtgcgccccaccgtcagcgggcgatgcagtcgcggcgccggttcgatatcctgccacagccagcgccgatccacgcactggaaggcgcgcacctgcagcaggcagaacaggcagtaaggcacgaagctactgccgatgccgatatcgccgtaggccatcagcttgacgaagctgaccagcaccccggcaaggaaaatttccaccatgcaccaggtcttgaactggaacagcacccgagccatccattctttgaggcccagtggcaagcgcactctggcgcacagcaggatgatcgccaccatgcaaaacgccgggatcagctgcacgaacaccataaacaaggtggccatgctggcgtagtcttccgccaccatgacttccgggatttggagcagccggatttcgttgccgaggccggcgacgcgcatgttgataaacgggaaaatgttggccagcaccagcatgaacaaggcgctgagcgcgtaaccgatcggccgcttgcgcggctcgttccaacgggcgctgagcgtggttttgcagcgcgggcataccgctttgctgccataggtcagcggcggcagcgccaccaacatgtcacactgcgggcaaagcgtcttatttcgagacgaaggggcgatttgctttggcgctggacgactgggtgatggcaacattgcttttctctggggtatggtttcaacttattggttatttgactaaatgaaactttctcaggaatgggcatggatgatagtttcattaagcgttcttggcgcagatgttggcagtattgagcgtgcggacttgttctgctatgtcatctatgatttggaaacgtctgcgatactctgctcgctttttgctggggatatgttccaaagattttctttcaaacgccaagggtagttgccagcgccacgaactctgttttatcccacctattaacgaccagaaatcgtcgtagctggcatgtaaatgctgacctttactcagtcgatacctcattgagcgaaaaacatgcccattgtcactaacaccataaatagcacgcacctcggtgaaattagcgaagtggctaataaactccatcaaaacacgtttggggaaaatgccagacagagcacgtgtagcatctttgatggcttcgtgcggtatgtgccgtccaggaccttgtaggccaccaatgatgagattccattcagccccttcggatacgaccgaaaaggtcacgctggcaagtaactctttattgttgccacgtaaccatagtgttgattcgccttctcgttcggctttgtgggcacaagaggcagaaatggtaaaatgggactcctctctgcctgtgaattctgccaagatcgtttcttctcgagatatcagcgcgttggacagtgctttgctttttagagatgacacataccgataatggctgacaattgccgatgcgcgttgttttgcattaaggttgcgcgtcaggtattgtcggtgcgttttacaagggaatgtgttttgatgatataatatcgattttaaatcactctgttgagttaaaatggatagtgcctttttagtcggtgaatagtataagataagccgaagtaagaactttgcacggaagctcttcttcctccatgcagggcctgggacaacctgtcccgaaagtaattcgtagataatgttttttttcaagttttatatcctacaagtactattctttaaattttacgtgtttgttggttggcggtttttctgccattttaatagataattgttaatttattgtctgctatttatcaagatttgatggagagggtgtttttaaggctaacagtatgcaattgtcgtgttttttatagcttgttgatgttttttatatggtgccatctatatggttattgatgctttctatttgaagcgcagtgattttgacattgtcggcataatgaatcacggaagtgagcttgagcttactcactcaggatgtttaataatgtaattggagtgaagtagaggcggttaggatatgattctttataatgataacgattttatcggtaagctgacttatgaaataatggggctcgtttgcagaaagcgccaccgttgaatgattattagggcggaggggggtgatatttcgggttgttggcaatggaattagaatgtaataattaagtgcgaacaaagatattggcaaggtgattttataagtaagtgtggtgatatggggttatcttagataggccgctgttttatatgaaagatagttctgtagtcgaaataagatgataaattttattaaattaaatttttttattctaatgtgtatggattgcgattttttcatgcaaatgtttcgtacgtaagagatttttgtaaaaaaatgaggatatatattttcattcagtgtcttcttggtttttctcgcagtatatgaattggtgtgatctttatgttaaaactcaattggttgtttttaatgttgcctagtgtgaattataaatggtgagcattaatgccttcactgacgaagatgtgctcatcatagagctgaaatatcgggtcgcctacgtggatccatatcgcgtcggtgatactggcggttaataacaacctgatgtagttcagtgaccggtagtatatcgcattgctacgtgtaccacgcctacctgccgtttatggccgaaaggggttatcagcaagtgatgaacctgacggtgttcggtcaggcggtgccgcagacgctgaaataatatgaacacacgttgtgtgacgatgagcgagtcgatcggctgggccgatcaatagaccatgattgatctgccgaacccattggacgctcaatagctgcgccgcctatagtgacagtgacccaaacacatgcagcaacaccagggcatcaaatcggccgctgaacggccaacatcataacgacaagcgttccccaaaccggctcaggccggttttttttgttcctacggtttagacggttcacgctgcaggtgaacaggggtgcacaccgagaaggtagctatacatccatcaatgcattgaaatataaagataaaataagaaggtgtatagggtgaacagttttcctataaatcttttttaatatggcgatcgctgggcaaacgctaattgtttataatttattctatgtattgtgcaccattttattgtgtataggtatatgtatagatttatgtttttctttataaaaaattgttttaaaacatgatgttatttgttttgttttgctcctattatcggcaccatttcaagtctcgcaatgccttccttgtaaaaatacgcagcactggcgtctgcaacgtttgcggttgatatttctgcttatcgctacgtggcaatgcgctgcaaggtataatacaaacgcgtttgtttaatcattcacacaaccagcaagcgtcgtaagcagaataatacgttgctacggttgaacctcaccgtctttttttatctggaaaaagacattgtcgccaatgttaaaccactggcttatttataaagtgaggttgttatgtgtggatgtttgatttcaagaacgaaggactttaactttaatggtcaacgttatagagtttttattgctcatgacaagcaagcgcatggcgatttaaaagcgctttactttctcgatgccaatactcaattctccaagctgaccgaccagcatcggcgcagaagtaacgataatattctttatgtcggcatcggctatcaggatggggtggatatactaaaagcaagaacccgcgactatacggttccctctgatgataaggagtttattgacggtggcggagcgccggcattttatcagtttatcaccacatgcgttaagccctggattgagtcacactactcaatcaatacagacaaacaaacgctggcaggtcattcacatggcgggcattttgtactttatacgctgttgaaccatcctgacgcgtttcaaaattatctggcggccagtccatcgatctggtgggggaatggggcgttgcttcctgatggcaagttaacaatcgctgaaagcgttaataaaataaccttgatgatcggcgagtatgaagaaaaggttcatccgcaaagtaatgaaactgaaagagagcgggtgaccagaattaatacaacacccaagttgcgagtcaggcatctggcaaaaaaactgatcgaagatgagcaacgctgtgattttatcttctgctcagggcgtcgtcatccgggtgtcatcaaggattatgcacttatggcgaatgcgatcgcggcgcataatactcaacgcgatgggctttagcgtcgtgatataatcattttttgaacacttgcaagtgagctgcttttagccgtctgcaggcattcaccagggaaactaaaaattagaacggtatgccaatatcaggcaatgaaaatttgttttaaccttatctcttacaatgactgctgcgggataatgttcgttcatctattatgcttacgagatcctgcgagcgtgcgtgttttttgagccgaaaccgagtatctgcaacctcacttcccatgcttccctctgcttatcctttcgccggttaaacaaccgtttaattaatcactgttataattacccctgttgagccttgatgggtgaatgttttcctcctcaagcagtgcgatgcggcgctctgtggagcggcatccgtttttggatatgccggtggttcggtgagaagttaggagaagtgcactatgagcagaaaagacaagctcgcggcggccctgctggccatcttcctgggcggattgggcattcacaagttttacctgggcatgaagtggtgggggctgttctacctgctgttctgctggacggggatcccggcgattgtcggctttatcgaaggtattatttatctgttccaatcggaagagaaattcaaccagaaatacaatcctggtctgatttaatgcttttctgacggcgcctcctgttaagggaagcgccgtttttcattccgttactgtttcttcatcatcatcttgccgcgcatctctttgctcatcattttattcgagctggagatgacgcagttatattgcttgccttggttaatgaccataaaggtgctgaccggatctttaaaattcttgtcgatggtgaaataaatatacgcctgcggcagcgccgccggtttaaaggcgccgaaggcatacacatccgccaggcccagcgcggagagatcgaccgtcagctccatcggtttcatggaatccggcgatgggaacatcgatttggccgacatcatcatggtgctgctgttgatggtgtaatcggttttaaccttcatgcccatatatttcgattccggcatggagagttcttttttgcaggcggcgtcgtgctgcggtgccgggctgccgttttccatcacggcgtgcacatgttccagcgtcacttccgcgttgccggtggtaggttgcgcatcggccgcgtaagccgcgccgctgaaggctgccacagaggtaaagataatgcccgtaacgattttcattgtcggtctccggaatgctaataatgatattaattgcggtgtgtagcctattggcttgataaaacgcaaagtgacccgttccatggagataaagcctcctcggaatattgttgataaaatatttccccgcccgctaaaaaacggactttttaattgctgtcagtgtctttgtccaactgcatataaatagtctgtctaaacatagtcaatgtttggaatatgcacaaattattgcagttttttttctttgtttgtgccttttgcttttaggttgagagaaatatcccatgcgatacagtgtgttgtgtttttaacgtgagattttacatgaggcgttatttatgtaagtggtatggtcacataaacgatgcgataagtgattatatattgccaggcttattattgaagttattaaagaataacgcggcgagagccgcgtttatcgatcgttcaataacggcggtatttcctggtaaaaaaagtcgatcagcgcttttaccgctggtggcactccgcggcgcgagggataaagcagtaccagctcgccgttttgcggatgccacccgcgcagcacctcttgcaaatcgccacgcgcaagcgcctggcggcaggcgtaatagggaatgccgcagatgccttgcccatcaagggcggcgcgcaggatcacctgcaaattatcgctgcttaagcggggtgagaagggcacggtgaccacggcgttttgcggcccgtagagccgccagctcggtgccccctgttgtggcgggtaaagcaaacagggcatatcgctcagctgttgtggtgttgacggcgcgccgtgtcgcgccagccatgccgggctggcggccaacagccatttggcggtgccgagtcgccgctggataagccctgcggcctcgttggcgatgccaagcccgcggacagtgaagtccaatccttcctccaacagatctatccgccgggcggtgacgtgcgtttctacgttcactttgggaaagcgcgccataaatgccggcaggagcggagcgatcacttcgtccgccaacagcggcgacgcgctgaagcgcacggtgccgttcggttccgccagcgtgcgcagcgccgtctgctgcgcctgatgcgcttgctgcatcatggcgacgcagtgcagatagacctcgcggcccacctcggtgagctgaatacgccgcgaggttctttgcagcaaccgcaggttgagttgacgttccaactgcgccacctggcggctcaggcgagaggtcgggatgcccagcgctgtgccggcagcggtaaaacctttgtgctcaaccacctgagtgaaaaaatacatggcgttgagatcgagtgtaaataccgtcatcacacactccatcatgatcatttttgcaatgatagcttctattatcgcctatttaaccctgatcgatgcggttttatcctgcaggcacaccattgttgaaacgaggataaacatcatgaaaaacctttaccgcactttggctctggccatcgccatggccggggcggcgcaaccggccttcgcggcgccggcagcgccacagccgcatactcaggcacagccggcgtccggccccttgcagctgttggatcgccacaactcggtgctgctgttggttgaccatcagatcggtctgatcaccggcgtgcgcgacatggagagcgcaacgctgaaacataacgtcgtggcgctcgccaaggcggcccaggtgatgggcattccggtgatcgtgacctcgaccggcgccaacggtcctttcgggccgatcattccggaacttaaggctgcgttgccgggggtgaacattatcgatcgccacagcgtcaacgcctgggacgacgcgaacgtgcgcaaagcggttgaggccaccggccgcaaaaagatcgtgatcgccggcgtatcgctggaagtgtgcgccggcttcccggcgatcacggccaaagcggcgggatacgacacctatgtggtgatcgacgcttccggcacgttcaatcagtccaagcatgaggcgggcatggcgcggctggtgcaggccggagtgatcccaacggattacggtacggtgggagtagagtggctgggagataacggcgatgccaaagccggcgagctgtacggcgcgctggatatgccggcgacgactttggtgaatcagctgttccaggccaagggcaaatagcgcctggagtgatagcgatatttttttcaatccttccaaccgcctgcgctagaatcaggcggttttctcttggaaaaggatatcgccatggccgcctgggcccttttgatcgtcggttgggtgttgatttggcaggatcagccgattgtcggcgtgctgtgcatcgcgctgtttgccgtgctgcaatgggcgaagtacgccgctaaaggcgcgcaagaccccgaagaggcggcagagtggcgcaagaccgactggcgttcgcagccgattgaaatggcgcacgccggtgactgtgaccggcagataggcggcgtgggggagttgggcatgggcggccccagcttttggacgctgctgctgcgcgacggggcgattgtgcatggcgcctgtgccgagccgcaggacgtggacggcggcaggttgcgcctgatcccgacccgcagccgcgagggagaggggctgacggtgtacgagcctgccgcccgggtgatgtacgcgctgcccgcgctgaccgatcgtgagcagggagccttggccgccggttccgccgaggcgctggcgcggctgcgggcgaagtgtcggcaggtggaggccacgccgttgcggcaggggcgcgggctgtgggtgccgcagtggatagaggaaccggcggatcgtctggagctcaccttgcccagcggccgcgcgctggcggcgcgtttgatgttgccgcccgatctgcgctatgcagacgatcccgccgcgctgctgcacgcaccgccttatgcgttgtggctggataaccggccgaccgatcgcttcgtgtgcgatctcgaacgcgtggcggaatccccggcgggtgatgccttcagcgtcggcggttgccagttccgcggcgagtatatcgtggatggcctgtaccacctctatttcgccggcgagtggttctgcctgctctcttatgcgcacaaacctgcaggtgggcgtggttcagacaccacctttttcgttgaacgagttgaaccgcaagacggcggcgtgttcgtgattgaatgggatgcctacagcgtggggcccgacgggcgtgagccgcgcgtgccggccccgccggtcttggttatcgcggtgagctggcaggaagcgccgctgcagctgcccacggccaataaccgcgtgaccgtgcgcctgcccaacgctacggcgtaatgcaacatggtgagctcgccggcctgcaaggcgcgcgttaatgctcacattttgattcgcttaagggcgtttcttcctgatcttgccgggagactcgccaaaataggttttacacacgcgattgaagtgtgaaacatcgacaaagcctgcccgtttggcgatatctgcgatggagagttcgtcaaattcttcggtattgagcatacgtaatgcggagttggcgcggtagttgattaacgcctggccgaaactggtgccttgattggccatcacgcggtgtaatgttctggttgaaatgccgacctctcgcgcgatatccgttgcggtcagaactaaattcatgtgtctttgatgcagactttccacgattttctgataatttctatcgcggctaaatttgcgggacaaggcatcttcgctaaccaaatcgtgatagagcagcgagagcagcatgccgatttgatccaatatcattggcggttgaaagtcgattgtgctcagataaggcggagaaatctgttccagataggcggctaatactttcccccagcctgaaagctcgctcaggttttgttcgatcattttttcgggattggcgacccaggtgttgagccactcagcaggcaacgccagcgtgcggttaaggaaaccctccggcaaaagtgaaatatattccttgcgcgtatcgagcaagattgcgctgcccgcaggcacggtgatctcttggccgtatcgattgataaatcgccatgtggcgccggcatacacgaggtggtattcgtcgctggcgctacgtagaatattctttctatcgcgctgtgagcgtttggctgaaccattaatgtcagtaatggagaattgcccggccttgagcgttgacagatggcaccagaagcgggagtgatcgtcgatggtggttgtaacgctgatcaggctttgtttcagcaggcgatcaaattcactcagccgctcttctgcaagcatgccggcagttgaccagttaaataaggaggacttgtcctttcgcattgcaccgctctccattttacgttgtccgttaacgtttatttttctcacattgcctaaaaaatgactgtctgactgggaatgttcctattgtcttttattaaagttacagcccttttcctctgtgccgtaagtcatcatcctataatgataagagataggttccttcttaagatgtaaatatcataaattatagttgattgcatcgcttgaacggggatttatcagatgatgtttctgatgtcattaaattctcttatgtaatacaaaggggattgttttaaggggcttaagtaaaccgccgtgatgataattatttcaaccggaatttgctttggatgccactcaattggctgtgagtgacaggttgcggggtaatttgacagcacattctttttctgccattggttatttgtgcaatgaagttaattaaatgaggagggagaagatgtctgacgaatttaacggaaagatcagcgagcgcgtcgttcgagaaattattatttggattgataataacttaggtggggatttgagtattgatgccatatccagaaagtcaggttattctaaatggcatctgcagcgagtgtttaaaatgcgagccggtatcaatctgggcggttatgtcagggagagaagggcgctctttgcgtactatgctttgacggaaacagatataccaataattgatattgcttttatgttaggcttcaatagtcaacaggcatttagccgagtgattgataaaacattcacgctttcacccggtgttattcgtcggctaagcagaaacggcacggtttcttttccggcattgattaataacagctattgttcaacgaccgccatgaatcccaccatgcgggtctctgtcatggagggaatgcgtaaattattaatatagttaaattctaattttaattggcgtctggtgattgccccttttgcttttgatgccttgtcactttgagcaaaaaaaatggcacgtttaaccctattaaaaaggacgctctccattagactgaaaacagtggaatgcacatggcgatcatggaaaggtaaaaatttgatttttaaatatttttttcaatttttaccgggttttaagagctgagaacccccctggttatataagaaaacgttgatttcttttaagatttttttcacaagacaagccaatttttttttcaggggggaggtaaatgattgatggagtggcttatttaatcagctttttgttaatattccgattttgtgtcttcaatttgcttctctgctgaaagagactaaaatttattctatgctttgtcatctttcagctggtcttagcgctgtagtactatacccggtccgttcagtccatttaaaggagtgagatatgtcaaagaaatatgttcgccttgataaaaatgatgccgctgtgctattggtcgaccatcaaacggggttgctttctctcgttcgtgatatcgatcccgataaatttaaaaataatgtcctggctgtggctaatttagcaaagtatttcaagctgcctacggtgttaacaaccagttttgaagttggcccgaacggcccgttagtgccggagctaaaagagatccatcctgatgctccatttattcctcgccctgggaatatcaacgcttgggataatgaagattttgttaaagccgtcaaagctaccggtaaaaagcaattgattatcgccggggtcgttacggaggtttgcgtcgcattccctgcgctgtcggcgctggaagaaggctttgatgtattcgtcgtgactgatgcatcaggcaccttcaatgaacttacgcgtgactccgcatgggacagaatgtctcaggctggcgcgcagttaatgacctggtttggcgttgcctgtgaattgcaccgtgattggcgtaatgatattgaaggattgggcgcgctgttctcagcacatatcccagattacagaaatctgattaccagctttaataaaatgagcgagaagtaatcttctaacgctcttttttgcatatatttggcatgatgcatgtgttgcgttgcatcatgctagtgttttttcccttatcgcagagctctgtgattgagcttaaatcgacaggccttttttctttatattcatccataaaagtttctgggcataggatgggaaattatgaataacaaattcagtgtgatgttcaacgcgattgccatatctctgatgacctgcggtatggcctatgcggcggatgcttctcactcgccgaaaggggaacaatcggttgttcaaacggcagaacctttcaaggcccatgttttgattaatgggcttgatgcgccctgggacatgatttgggggccggatggcgacctctgggtaacggagcgcaaggctgcgtcaatcgttcgtatcaacccgcaaacgggtgaaaagcaggtggcgatcaagattgacggcgtgcatgtcgggccgcagcatgaaggggtattggggctggcgctgtccccgaacttcatgaagccgggaggggataactatgtctacgcctcctatacctatatgaatggcaatgacgagcacgcaaaaatcgtccgtttcgagtacgacgagaaaaccaaaaaactggggaatgagaaagaaattctggcgggtttcccggcaggcaacgatcataacggcgggcgcctgcgttttgggcctgatggcaagttgtattacacgatcggcgagcagggccacaaccagggtgccaatttctgcaagaaaattgacgctcagcgaatcccgaccgaagccgagctggctaaaaaagattattcctcttacgccggtaaagtcattcgcttaaatgtcgacggcactgttccaagtgataatccggtgattcacgggataaaaagccatcttttcacctacggtcaccgtaatccgcaaggtctcgttttcgtcggcaatacgctgtacgccacagaacaagggccttcatccgacgatgagttgaatatcctcgaagccggcggcaactatggctggcctcatgtcgcaggctatcgcgacgatcaagcatatgtttacgcgaactactccgaggctaaaaattgcccgtctctgcaatgggatccgaaccatatcccggcgggcgtaccgatccagaaagagaccgaatggagcgcacctgatttcaaagcgccgttgaaaaccttctttaccgtaagagaagggtttacttataacaacgccagttgtcagggcgattcatcctatatgtgttggccgacaatcgcgccttccagcattgcgtattatcctgagaatggcgtgataaaagcttggcgcaactcggttattatcacttccatgaaaatgggggcattgtaccgagtgccgttaaatgcggataagaaggatgtgcagggggatgtgattaaatatttccacaccgcgaatcgttaccgtacggtgttggtgagccctgatacgcggaaaatctatgtagcgacagataattttggcaacgttatggatgaaaccaaccatcctacgcacgatcacagcaaccccggttcgattctggtctttgaatataccgggcagtagtcgtgaataagggagatatctgatgatatctccctgaattgagccggaatagaacggattttttggcttagctgccgttactttacataaagagggtaaacatcatgctgttatggcaaaaacctgagtttgttgacctgcgtctggggctggaagtgacgctgtacatttccaaccgttaatcgcccgtctgcccgcctttcgcgcgggcatttctttccctctttttctggttcagacatgcagataaaagttctcggctcggcagcgggcggcggctttccccagtggaattgcaactgcgacaactgccggggcgttcgcagccacagcatcagcgccacgcgccgcacgcagtcttccatcgccgtcagcgacgacggtaaaaactgggtgctgtgcaacgtttcaccggatatttgccatcagctgctggcctcgcccgaattgaacaatcccgacgtgctgcgcggcaccggcatcggcgcgatcgtgctgaccgacagccagatcgatcacagcgcgggcttgctcaatctgcgtgagggctgcccgcaccacgtctggtgcacccctgaagtgcatgacgatctcagcaccggtttcccggtgtttcccatgctctcccactggaacggcgggttgattcaccacccggtaacgcccggcgaaccttttcacacggcggtctgcccgaacgtacgctttaccgccattccattgctcagcaacgcgccgccctattcgccgtaccgcgatcgcccgctgccgggccacaatgtggcgctgttcatcgaagatatcgcgcgcggggtcggcctgctgtatgcgccgggcctcggtgaaccggacgaagcgctgatgccctggctgcgccgcgccgactgcctgctgatcgacggcacgctgtggcgcgacaatgagctggccaacgccggcgtggggcgcaacaccggcaaggacatggggcacctggcgctggcggaagagcacgggctggcggccctgctcagcgccttgcccgccaaacgcaagatcctgatccacattaacaataccaacccgatcctcaatgaagactcggcagagcggcaaagtctgaccgccgccggcatcgaagtgagctgggacggcatgaacatcgaactgtagggaatcgccatgacgcaaccacgccccctgacgccgcaggcatttgaagcggcgctgcgcgccaaaggcgcttattaccacatccaccacccgtatcacatcgcaatgcacaacggcgaagcgacgcgtgagcagatccagggctgggtggccaaccgcttctactaccagaccagcattccgatcaaggatgcggcgatcatggccaactgcccgcagccggacacccgccgcaaatgggtgcagcgcattctggatcacgacggctacggcggcagcgaaggcggcatcgaggcctggctgcgcctcggcgaggccgtcggcctgcagcgcgacgcccttctttctgaacagctggtgctgcccggcgtgcgctttgcggtggacgcctacgtcaacttcgcgcgccgcgcctgctggcaggaagccgcttgcagctcgctgaccgaactgttcgcgccgcagatccaccagtcgcgcctcgacagctggccgcaacactacccgtggatcgacgccgccggttacgactatttccgcagccgcctcggccaggccaaccgcgacgtggaacacggcctggcgctggcgctggactattgcgacaccgtagaaaaacagcagcgcatgctggaaatcctgcagttcaagctggacattctgtggagcatgctggacgccatgagcatggcctacaccctgaaccgcccgccttaccacagcgtgaccgccgcgcgggtctggcacaaccagaggctggtgtaatgacgctgaaccctgaacataccccggtattccgccgtggctaccgcctgcaatgggagccggtgcaaaacagccacgtgatcctctacccggaaggcatggccaagctgaacgacagcgccgccgccatcttgcagctggtcgacggcaacaccacgctgaatggcatcatcgcgcagctgaacgcccgcttccccggcgccgacgggttggcggacgacgtgctggagtttttccagcgcgcctacgaacaaaaatgggtgaccttccgtgactgaaccacgtgcgccggcggtgaatccgcccctctggctgctggcggagctgacctaccgctgcccgctgcagtgtccgtactgctccaacccgctcgattttgccgcgcaggaaaaagagctgaccaccgcgcagtggatcgaggtgtttcgccaggcgcgggcgatgggcagcgtgcagctcggcttctccggcggcgagccgctggtgcgtaaagacctgcccgagctgatcgccgccgcgcgcgatctcgggttttacaccaacctgatcacctccggcatcggcctgaccgagaagaaactgcaaaccttcgccgacgccgggctggatcatattcagatcagttttcaggccagcgacgaaacgttgaacgccgcgctggcgggctccgccagggcgtttcagcagaagctggcgatggccagggcagtcaaggcgctcggctacccgatggtgctcaacttcgtgttgcatcgccataatatcggccagatcgaccgcatcatcgaactggcgatccagctggatgccgacgacgtcgagctggcgacctgccagttctacggctgggcgcacctgaaccgcgaagggctgctgccgacccgcgaacagatcgccgaggcagaagcggtggtgaaacgctatcgcgagcgcatggccgccgacggcaaactggccaacctgctgttcgtcacgccggattactacgaggagcggcctaaaggctgcatgggcggttggggcgccatcttcatgagcgtgacgccggaaggcatggcgttaccctgccacagcgcccgtcagttaccgattacgtttccgtcggtgctggagcacgatctgcagcatatctggtaccactccttcggctttaaccgctatcgcggctatgactggatgccggagccctgccggtcctgttcggagaaagagcaagactacggcggctgccgctgccaggcgttcatgctgaccggcaacgccgacaacgccgacccggtgtgcggcaaatcgccgcaccacggcaccattctggcggcgcgtgaagcggcgaatcactcgcagatcggtatcgatcagctgcgttttcgcaatcagaccaactcccgactgatcttcaagggatagcgtggtgctgtcttcactgagatctgccggaacggccttttgaaaattacgccacggtctaacgcttaaggcagcaccctgacttcgccgtgctgcaaggtcagtactgcgatagggctgccggagaagcactccttaaagagccagccgctgggccgaaacgccgctgcgggcagcccggcctgccactcctcccactgcggggtcggctgatccgacggcaaagagaaagagaccagccaaccggcttcgcagtgcgccctttggccggttggacgggtgaaggtatgcgcatctgccagctccatcaccggcggtaaaacctcaaaagcgatgatcggcacgccggccacgctttgcggctgagggaagcgcacggcggttacaccgtccatcgtgatggggctgtcttcggtgccgggctggcgcggctcctgccggtttacccagcttccctttggcagggtgatttcgccgaacggcctggccgcctcgagcgtcaggtagctgcgccgattccagcgttcttccgcccgctggctcttgagatcctggatggcaatgtcgatcagcatcagcgcgaacgctaccgggtagatcgccagcgccgaggccaacagatagccgccccaggaaagcggcgggcgcgggcggccgcagcgggcggcggcatatcgccagccccaccaggcgagcaggatgccggcgagcagcagggccaataacagcgccagcaggccggcgacgccggcgccataacctaacagcatggcaagttccttatgttcacggcgtggtggagcgatagcgaatgaagtagggcagcgccggggtctccccgtcatcgccatagtggctttccggttcgatcacggtttggcgtgcgtcgtcgcgcccgttgtagcggtactccaacggctgtcggtagcgcacttcggatgagcgcagatcgaaaatcagcgaaagacgggcatcgccgttatccgtttgggcgaccagcttatcgttgcccgcccagagctgatacagcgatttatcgccggtctccagcagcaccttcaactgcccgtcggattgataacgcagaagctgatacactcctctgtccagcgtttgggcgatcaggtagatgccgccatccggagcctgcgcgctttccttgacgcgcaccgttagccaatgcagttcggccacctcgccggttttgccgttaacggcgatgtgtaacgcgccggaaccgagcaccgggttcatccagaaatgcacgcgatcaccatcaacggcggtgaagatctcgggtacggatttgcgcttaccggaggcgtaagccgtcggtgagtcctcctcgccgcgctcaaagcccagcagttgccgcgcgtccagcagcgccggcagatccagcgtctgccgccaatgggcgccgaagtccgggctgtagaatacgccttcggtgctgatgagatacagcgcgcgttttcccggttgcgccaccagtttgccgccgacaaaggaaggccggttgtcgtcgccctccggccaggggatcagcgccccgatggtgccccgttgcacatcaaccagtctgcggcccttagagagaaaaagcacgcactcctgctcgccgcaaaccgcatcatggatcaagtcgtcgagttcccccagcatctgtaacccttttgggccggcaaacagcacctggctgaggtagttggccgcccagccgtaaaagctattgtacgcgcggtcttcacttcttttgctggtgagcagcagggcgccgtcctgcgccgggtagctgtggatgagatcgtaacgggctatcgtcggcaacgcctggtcgccctgagtccattgccactgcgcatagcgttgctcaggggcgagcaaatagacgcccagcgcgctggccaaaaacagcgtcaggataataaggggtcttttataaagcgctaacgtcatcatttcagctccgtcacctgagcctgccgccataaactgcggcgcagatttctcaggtatttaaacgttttaaacgtgcggtgctggtcaaaagagtacaggcggcagatctgggcgaacccctcgatcaacagcgccaggccgctgaccatcagcatcagcagcagaataatcggcggcaattcgctgccgagacgcttcagggtccaggcatccaggtgaaagccggccggggtatcggcgttatccaccaccatcatgccgagtacaaaacacgccacgattgccccaaaaatgaagacaacgcgcgcgcacaggttaagaccggcttcggtgaagtagcggctgccgccgatgagataggtttggcgatcgcgatgattgatgatcccacgcactttgggcaactcgggaatgacgtcgttctcgcaatacagcacctgcagcggatcgcctttggcgatgaaaagcggatgttgccgacgaaataccggatgcagtttggtattggggacattgagcgcgcgggtcgtcaacgcgaagtgcgtctccttctgacgccacgcatacgtatccaaatactgcacctgccgcgggatctcatagtggcagagttcgtagttcagggcgttgaccgtctcgatgccggaggtctcgacgccgtccgggagagggggcgcggtctgcagcggtgcggtcgccggcacagcgtctgcgcggacggcccggtatttgatgccggggattttcaggctgagcgagccgggcggcgtgacgtcttgccccagcagcacgcgatccagcgcccggagcaggcgcctgcggccgcggtgtccgatcagcaggagctccgaaccgacgaacagcgccatgccgatgccgataaggccggcgatgatggcgataaagaacaggacgatggtcagccaggaatcttccccgtccatgatgaaaaaggccgccgggaaaccgccggccagcaccgcgcccagcagcagcagggcgaagtatttcagcttgtatttcagcgttctgtcaggctccagccggcctttcgtgccgtgcagcagccagtgcagccagtagctgccgtcttgcaggcggtgggcaccgatcttcacccgatcgccggcggcgagcctggccagcagattttcgctgtcgctgaagtcgtcgcggtaaaaaaagaacgtctggccggaggcgatgatcctcaccagattgtcgggcgccgtctgctggcaggcgcattgttcgacggtcacattaaaaaattgggtttgcatgtcattccctgtcagtgggcgtggcccgaaaattcatccctggcgccgggtattcagcgttttttcatcagcggcagcatgcgtaccagcgcattgtccttgacgatatagtggtggaacagcgcggcggcggtatgcaggccgatcagccagtagccgaatgacgccagcgttttgtgccagccgataatcattcgtgcctgcggccgatcggccacgtcggcgaacggcatcgacaggccgaacagataccactccttgccgcccagatagcgcgaatacacccccagcactggcagcgtcagcagcagcaggtaaatcagggcgtgcgtcaggtgcgccaggccggtttgccacttcggcggtttgggcgcgatggcgggcgaggggtagcgccagcgcaggaacagacgggcgatcatcagcgcaaacaccgttacgccgcagctgaagtgggtgacaaccagcgcgtaccagggggcgctgcccggttcggcatagccgcgcagctcgatggtgacacaggtgatgaccagcaggatcgccaccagccagtgcaggcgaatttgccacggcatgtaggtgttctgcaccgggttaccttttgatgttaaagggtctgtgtgccgatggtaactaaatgttacaggcgaggaaagcgcctgcatgcagtttaagcaaaatgccagggattacgccgcttattaagctatgaatttagtgggttaagtgcctggcgacaggggggggcagttagcatcgtaagttgtgaagttaatgcgcggtaggttcagaggctggcagcttattaagcgatgaggcgggtagcgccgcagctctcgccgcggcgcctgggatcagtttaatttggccttggcgaagtcgctgccgttcacgtccaccacgtagccgctcaggttgctgcgggtggcgtagaacactttgccggtggccagcggcagccacggcgcctgtttggcgaagatcacctgcgcctgttgatacagcctggcgcgcgcctgcggctggttctcctggatcgcctgctggatcaggctgtcataatccttatcgcaccagcgcgccacgttggcgccgctctgcacgccggcgcagccgagcagggtggcgaagttatccggatcgccattgtcggacacccagccgtacagtgcgctctgttgctcgcctttgcgcagcccggccagatactggccccactcccaggtaacgatcttggccttcacgcccaccttcgcccagtcgctctgaatcatctcggcgatgcgcttcgagttcgggttgtaagggcgctgtaccggcatcgaccagatatcggtctcaaagccctgctccagcccggcttgcttcagcagttcgcgcgccttctgcggatcgtaggcgtactccggcagtttatcattgtagcccagcatgcccggcggcagcagcgagttggccggggtgccgctgtctttgaacacggcggcgacgatcgctttcttgtctaccgcgtagctcagcgcctggcgcaccagcaggttgtcgaacggttttttctgggtgttgaacgccagatagccgacgttcagcccggtaatgtcgtgcagttgcagattgccgtcggccttgatggcggcgaattgctccggcagcggtgccgggatgatctggcattcgttggttttcagcttggccagccgggtttgcggatccggcgtaatcgagaagatcaggtgcttgctggccacgtcgccctgccagtagtgcgggttggcgatgtagcggatcagcgaatcctgcttgtactgctgcagcgcgaacggcccggtgccgatcggccagttgtcgacgtattccggtgtgccctttttcagcatcgcgtcggcgtactcggcggacaggatcgaggcgaaatccatcgcccagtcggcgacgaaggcggcgttgggctgactcagcgtgaagcgcacgtggtgctcgtctaccgcttccaccttggtgatcagcttatccagacccatgtcggtgaagtattcatagttgccgccggagaccttgtgatacgggttggcgggatccttctgccgcatcacggtgaacaccacgtcttcggcgttgaagtcgcgcgttggggtgaagtatttgttgctgttgaatttcacgccctggcgcagggtgaaggtgtaggtcttgccgtccgggctaacgctccactcggtggccagcgaaggggcgggcgttttatcgctttcgcgcagcgtcaccaggcggttgtacagcacctgcgaggtggcgataaaggtcggcccggagctggagagctgcgggttgaacgattccggcgaggcgacggtgcagtacaccagcgcatcggaagcggccagcgcgccgcccgccgacaacaggccgcagccggccagcaccaatccggcgatagggtgttttaaaaacgtcaaggcaagatcctcaggtggaatgagccgttaccggcgaattgatctaactatagataacggatggcgagatcgggaacaagcgcctcatcggtgcattctgtgcgccccgcgttgcctgccattgcggcgcagatctacactgctgggcaaacagtcactcgcaaggatttcccgatgagccactttcgccctgtcgcccttgaacacgccagccgcctgctgaaccatggcccgacggtattgatcaccagccgcagccgcgacggcgccaaacgcaacgtgatggccgccgcctggtcgatgccggtggagttcagcccgccgcgcatcgccatcgtggtcgataaaggcgcacacagccggcaaatgatcgaggagagcggcgcattcggcatttgcgtgccggcggccatgttcattgacgccacctacgcggtcggcagcgtgtccgggctggatgaagacaaattttcccgtttccatatcgccgcggcgccgagtgcagcgctgcaggtgccgctgatcgaagagggttgcgtggcgtggctggagtgtcggctgctgccggaaagcggcgcgcaggaaaaatacgacacctgcttcggcgaggtgttgagcgcggcggcggacgagcgggtgttccagcaagggcgctggcacttcaccgccgccaatgcggatctgcacaccattcatcatctgggggcgggcaacttcgtgcgcagcggcgagacgctgcgggccaaaccgctttaatcggcctcgcgtttgcggtctgcatcatagcgctcgcgggcggcgtccagctcggggaagtggtattccgcccacttatccagcgccgtcagtgtctcgaccagcgagcaggcgacggcgctgaggcggtattccacatgggcctgattcttttcacttaaatccagccgctcgagcagcccgttgcgttccagctggcgcagcgtttgcgtcagcaccttctgcgaaatgccgtcgatgcggcgcagcagctcgccgttgcgcatcggccgctgcgccagcgcgggcaggatcagcatcacccacttgccggaaatcagcgccagcgcatcgcgcgcggagcacttgctcgaatagacgtcgccgggataagccattgggggttaccttcaggtgcgtaattgccaagggggcgataaagccacagcataacagcaccaccttacaacgggagaaacaggatgaacgtgctgattgtgctggctcaccccgagccgcattctttcaatgcccatttggccgaacaggcgcggcaggcctggctggcgcaggggcatcaggtgaaaacggtcgatctgtatcaggaggggtttgatccgcgcgagggcgccggccactaccccagcagaaagcaggcggaccggttcgatgcgatgcaggagcagcgccatcactggacgatccaggcgctgccggcggagatccggcggcatatcgagctgctgcgctgggcggatacgctggtgctgcagtttcctttctggtggttcggcgcgccggccatcatcaagggctggatggatcgggtgttcgtttacggcgggctctacgacagccgccaccgccatgagaacggcgtgatgcgcggcaagcgggcgctgctggccgtcaccgccggcgcttccgcacaggcctgcgcgtcggacgggcgcgacggcgacatgcggctgatgctgtggccgatcatgcatgcgctgcactatatcggctttagcgtgctggagccgttcctggtctatggcgtgcgcggcgggctggcgggcaaggagcggcaggcgcaaaacgccgcgttggcgcaggtgacgcaggcatatcgggctggaataagcgaccttgccgcctggccggcggtgccgttcaaccgtaatgaagattttgacgccgatctggcgctgaagcccggcgcgccggtctacagtccgttcgtgcggcaccgagatccggcttagaatccggccttcagcagttcctcgcgcaaatcgtcgataatcgccggttcgatgtcggggaactgctgctgaatatcggcgatggcttcggccacgctcgggccggcgaaggtgccggagaagggcagcagcggcagattggcgtcgctgtccggcagttcaccgcggatggtgccggtgatcatgcccgcttttttttccgccgtgaggtcgtactcccccacgcttttgtcgatcggtttcattggccgcctcgctgtcggtgagtgttcaccctgttctgttaaagcatagtgtttcaggcaatgaataccaatcaatgtatataatattaatataaaacaaagtgatgcgtattttgtcgtttgacgttcaacggcggccggcgctatgctcttggcgctaaaggaaccttcctcactgacagggacagacgacatgaaaagactgaaaagcgcggcgctgctgttgccgctgttggcgctcagcgcctgcactcactccctcagcagcgcagagcagcatgccaaacactacgtttatcaaacccgcgacgacttcgatccgcaattccgcaccgatgtgaacggcagcattaaaaacgccgtgccgatgttcgaacagttctatcagcaggggaaaaaggatcgcgcggcgggcgtggcgcgcagcgaagcgcagaaaaaggccgactacctggccagcgcggaattccagcagaacatggaacacaaaaccattttcatcaatcgcgcctacagcagcaccgacaatcctaaacgccgccaggtgctgtcgcaggaagcggtgggcgcctattgggacggctacgaagggcgctgacttaatcccacataaacagaaggtaataaaaactggccttctggcggttatttgattataaaaaccgccgctaaggacgatgttcatagaagaaaccaggagtgtttatgttggcaaaagttaagcgttcgttcgccgccgccgtcgtattgatgttggcgctgcccgcagtgcaggccgcggattaccgtgcgggcgagcaatatacccggctggataagccggtggccgccgcgccggcggtggtggaatttttctccttctactgcggcccttgctatcagttcgccgaaacctaccgcgtaggcagcaccgtcgcgcaggcgctgcccgccggcgagaaagtcaccaaatatcacgtcagcctgatgggcaagctgggcaatgagctgaccgaggcatgggcggtggcgacggtgctgggcgtggaagacaagattgaaggcgcgatgtttgacgcggtgcagaaacagcgcgccgtcaacggcgccgacgatattcagcgggtgttcacggcggccggcatcgatgccgccacctatgaaaacgcgcgccacagcctgctggtcaaagggttgatcgccaagcagaatgaagcggtgaaagcgttcgaggtgcgcggcaccccgtcgttctacgtggcaggtaaatacaagatagataatgccggcatggccagcaccagcgtcgaaggttacgccaaagagtacgcggcggtggtgcgccatctgttggacacgcagccttaaggcgatgcttccccggcgcccggtgatctgtgatcgcggcgccaaatcccccgttcgccattgattgtgtgttaacggattgttatggtgtttttctgttcaacggcgcagcaccgctgttgtttgaagggagagatcatgacggcattggcaacgctccgggacgtcggcttcgaagagtggctggggaaaatcaacaccgcctgcggccgattctgcgcgaaaacgttggggcccggctttcgcggggcgatgcaggagtttcgcgcccatgccctgcgcctgagcgtggtcgacgtgtctcaggcccggttgtaccgcacgccgcgtgagatcgcccgcagcgacggcgcgcactttttcaccgtcatccagttgcgcggcagtgcgttgatggagcagggcgatcgccaaacgctgctctcccccggcgacatgacgctgatcgatgcctcacggcccagcagcttcaccttccagcgcgattcgcgccaaatatccctgttgttgccgcgcggctgcctgccgctgccgccgcctggtgcgcaacgtctcggggccgagctcagcgcggtgcgcctcagccgccagctggtgctgagcagcatgcaggatcctcagctcgccgcggcggaaagcgaggcggtgctgaatgcgctggcggcgctgctgcgcccggcgttggcgctcgaacaggcgcgtccggaggggcagcaaccggtcttcgacaaggcgctggcgttgatcgacaggcatattcagtcggcgcagctgcgccctgagtgggtggcggccgagttgggggtgtcgctgcgcagtctgtatcggttgttcgcccgccaggggctggtggtggcccagtacatcaggaaccgcaggctggatctgtgcgcgcaggcgctgcgcagcgccgccgggcaagaaaagctggccggagtcggcctcgactggggttttgccgatcacagccatttctcgaccgctttcaagcagcgtttcggcatgtcgccgagcgagtaccgtcggcagtatcagtaagccagggcgcgggccaggcccgcgccgcttcactcaatagcggatgcagaccgatttggtttcggtgtaggcatccagccaatccgggccgaaatcacggccgctgcccgactgtttgaacccgccgaacggcatgttcgggtcgatcagcgtatgggtgttgacccacacggtgccggcctgaatgcgcggcgtcagcgccatcgcctgctgcaggctggtggtccacaggctggcggtcagcccgaagtcggtgtcgttggccttgctcagcgcttcttcggcgctcgccacccggatcaggttgaccaccgggccgaacacttcctcgcgcgtcaggttcagccgatcgtccgggttgatcaccagggtcggcggaatgtagaagccgttggcgtccggcccggccgcgccgccgataagctcggcgtttttcgcccgggcgtcgtccaggtaggccgccaccttgttgcggtgcgcgagcgacaccagcgggttgatttgcgcgccggtatccatccccggcccgaccgacagcgatttcaccgcctgttcgaatccggccaccaaccgatcataaatcggcgcttcgatatagattcgcgagctggcggcacacacctgcccctggttgaggaagctgccgagcatcaggccttcgatcacctgctgcggatcggcatctttcagcacgatggccgggtttttgccgcccagctccagcgtcacgcgggtcaggcgatccgccgccgcgcgcgcgatgcttttgcccaccggcgtggagccggtaaagctgactttggcgatcagcggatgttcggtcagcgccttgccgcatacggtgccgcggccggtgaccacgttgaacgcgcccggcggcacgccggcttcgctcgccagttcggcgatgcgcagcagggtgagcggggtggtttccgacggcttgatgacgatggagcagcctgcggccagcgccggcatcactttccacatgccgatcatcagcgggaagttccagggcacgatgccggcgaccacgccgatcggctctttgcgggtataaacctgatatttggcgcccggtggcatcggaatggagacgtccagcgtctggccggtgattttggtcgccagcccggcggtgtagcgcatccagttcagggtgctgccgacttcgaaggcgcgggcgatgttgatggatttgccctgttcaagggtttcgagctgcgccaattcttcggcgtgctgctccaccagatcggcgaagcgcagcaggatgcgttcacgctctaccggcagacgctgcgcccagacgccttcgctgaaggctttgtgggcggactgcaccgccagcgcgacgtcgtgttcattggcgtcggcggtggtggcgatctgctgcccattggcggggttgtacaccgccaggcggccttccgcggcggacgcgcgccactggccgtcgatatacagcccatgctgacgatcgagaaaacgcgacacgctatccagcacggctacggtattgtcagacatacatcctccgatcaggctcatcaggttatcgttaaccctgcaagtctagatcagtgggaaagcggcggctttggtctgcctgacattcggtttgtcctgcgtgtcattttgccgtgacgggagagtaaaccgcggccggcgggcgccggccgggagggatcacgagctcagggtcgccagacgggtggcgaaaccgaggaacagcaggccgatcaggccgttgccgagcttcgccaggcctttcttgtggttgaagaaatgcgccagcatcgcgccggagaagatcagcgtgctcatgtagataaagctgacggcttcgaggatcagcgccagaatggtgaacgacagcccggtgtgcgcgtagttgaagtcgatgaactgcacgaagaacgacacgtaaaacagaatggctttcgggttggtcaggctcagcgtcagcgacttgcgcagaatgctgtggccgccttcaatttgctgctgttgcgcctgtgccttctgcacgaaggtggcgtagaggatttttgcgccgaggaacagcaggtaaatcgcgccgagaaaacgcaccagggtaaacaggaacggcgtggtgcggatcagcgacgccacgccgatataggcgcagaagatcaggatcgcatcgccgataaacacgcccagcgccgcggtgtagccggcgcgcacgccgcgcgatatgccggttttcagcacgtacagcgtattcggccccggcagaatgatgatgaagaccaccccggccaaataggtccataaattcaggacgccaaaactctctaacacaataacctctccatgcgcgcaactaacaggcaaaaacactggccacgcccgtggccggccgcgatcctaacgccgtgcaagcgggttggcaacgtaataaacttcatgttgttggttaaaaattgtcgaaacattgttgaaaacgtcggcgtcgaattaaaaagcaagagtcggcgtgtttcgccaacggcccgtcactatgctggttaacatcgaaaccgcagtgaggaacggatgatgaaaaacgtaatcgacagcgccgatccgcgctggctggcgatcgtcagccgcgacaagcacgccgacggccgctttatctacgcggtgaaaaccaccggcgtgtattgctcgccttcctgcccgtcacgccagccgaatcggcaaaacgtggagctgttcgacgatgcggaacaggcggaggcggcgggttatcggccctgcaaacgctgccgccaggggctgacgccgttgacagagcagcatgcgcggcagatagccgaggcctgccgctatatcgaacgggcggagaaagcgccgtcgctgcagacgctggcgcgccacgtcgggttgagccaataccatttccaccggctgttcaaagcgatcaccggcctgacgccgaaaggctacgccgacgcgcagcgtagccagcgcttgcgcaccggtctttcgcagcaggagacggtgaccgacgcgatcttcgacgccggctatggcgccaacggccgcttctaccagcaagccaacgccgcgctgggcatgacgccgaaggtctaccgggcgggtggcaaaggcatgcgcatccatttcgccgtcgggcgctgttcgctgggcgatatcctggcggcgcagagcgaggtgggcatttgcgccattctgctgggggacgatgcgcagcagctggtgcaggatctgcaggataaattccccaacgccgagctgatcggcggtgacgcgcagtatgaagctctgatggcgcaggtggtgggcctgatcgaagcgccggagagcgggctggcgctgccgctggatattcgcggcactgcgtttcaacagcgggtctggcgggcgctgcaggcgataccggtcggcgaaaccgtcagctatgccgatatcgcccggcgcatcggcgcgccgaaagcggtgcgcgcggtggccggcgcctgcgccgccaacgtgctggcggtggcaatcccctgtcaccgggtggtgcgcaacgacggcgccttgtccggttatcgctggggcgtcgagcgcaagaaagccttgctggaaaaggaggcgcagcgatgagcggcgcgctggcggcgcggttggccgaattggactgggcggcgatcgaacgcgaacttgatgcgcaggggggcgcgcgcctgccgggcgtgctcagcgccgagctgtgccggcaattggcggcgctttatccgcatggcgagcacttccgcagccgcattgtcatggcgcggcacggttttggtcgcggcgagtaccagtattttgcgtatccgttaccgcccccggtggccgaagtgcgcggcctgctgtacgcgcggttggcgccgttggccaatcgctggaacgccatgctgggtctggcggcgcgttatcccgccgaacacgaggcctacctgactgaatgccatcaggccggccagcggcggccaacgccgctgctgttgcgttacacggagggggattacaactgcctgcatcaggatctgtacggcgaacgggtgtttccgctgcaggtagcgtttttgctctccgcccctgaacgggatttcaccggcggcgagtttgtgctgaccgagcagcggccgcggatgcagagccggccggaggtggtgcccttgcagcagggcgacgcggtggtgttcgcggtgcatcatcggccggtggcgggggcgagaggctactatcgggtcaatctgcgccacggcgtcagccggatacgcaccggccaacgccacacgctaggggtgatctttcacgacgcgttatagcttgcgcgccagcagggtggcgaagcgcagcgagatgcggttgccggcggcgtcggtcttgtgcagttgcccgacgtcctcgttgtatttgaggatctgccagtcgcggtaatagtgcttcagctcgcccggcttgaaggtgaacgggaacggcagcgggcagggataatcttcggtatccatcgccgccacgatcagattatggccgccgggcacggtgctgtcctgcatgttttgcacgatatgcgggatctgctggcgctcgaggaacatcaacaccacggtggacaggatgaagtcgtactcgccgctgaagcggtgagtattgagatcctgcaccccggcgctcaggcgggtcagctgctcggcgtcgatgatctgattgaggcgagctatcgacggcgcgtgcttgtcccaggcggtgacgtcgaaacctttcagattgagatagagcgaattgcggccgccgccgcagcccagatccagcgccttgcctggtgcgatgcgcgccgccgcctcaaccacttccgagtgggtgcgcgtcagttcgtatttcttgtggtagtaatcttccggcgtgcagtagaacgccagccggcaggtcatgtcgtccgagaaggaaacgatgcgatgccactgctgcggttcgataaacggcggctggctttcggggctaaactgccaggtctcggtggtagcgccgtcttcggtcatcatggcgaacgtcaggttgccgctcagcacggtgagcttcgcccaggtgccgctctgggtgttgtggcgctggcgaaaggcttccggcagtgtgtcgctgttccattccggcagggttttatagcaaagcagctgctgctccatagggggctcctctggctgggcaaacaaagtgatttatatgatgtatataaaatacatctttatcgatcgtttgaacatagcggcctgacggaaaggcgcggcgatatctttatactggattgtgcgcggcggctgggctaatttcagtgctgttcatgtcatcacgttcagggaaaagatgccgatatctcgtttattccacccgatgcccttccgtttgctgagcctggccgcgctgctggcgctggcgggctgtaccagcaaaaccaccaccacggtgccggcggcgcgccccgccgacgtcaaagcccgactgatgacgctgatcccggccaacgccggcgatcgtcagggctgggccaccgatattaccgccgccttcgccgcgcagggcattgaaccgagcgatgagaacctgtgttcggtgctggcggtgaccgaacaagagtcgacgttccaggctaacccgcaggtgccggggctgccgaagatcgcttggaaagagatcgaccgccgtgccgatcagatgcacatcccgaactttttggtgcataccgcgttgaagatctcgtcgtcgaacggccagagctacagcgagcgtctggataaggtgcgcacggagaaggatctgagcgatatcttcgatgacatgatcgaccgcgtgccgatgggacagaagctgttcggccatttgaacccggtacataccggcggcccgatgcaggtgagcatcgccttcgccgaggcgcacgccaaagggtatccttatccggtcgacggctcgattcgccgcgaagttttcagccggcgcggcggcatgtacttcggcattatgcatttgctggggtacccggccgattacagccggccgatttaccgctttgccgacttcaacgccggctggtacgccagccgcaacgcggcgttccaaaacgcggtcagccgggcgagcgccattccgctggcgctggacggcgatctgatcgatttcagcagcgacaagcccggctcgaccgagctggcggtgcgtacgctcggcaagcgcctgaacatgagcgacagcgccattcgccgggcgcttgagaaaggcgatacggctgactttgccgataccgacctgtataagaaggtctttgcgttggcgggcggcaagctgccgcgtgagatgctgccgggtattcagctggaaagcccgaaaatcacccgcaagctgaccaccgcctggttcgccaagcgggtggatgaacgccggcagcgctgcatggcgcgtgccggcgggtaacggtatgaaaaacgccgccggtggcctgaaccaccggcggcgcgatgatcgcgcctcaggcgctgcggcgcgggttggtcaggccgaagttaaaactgttgcagcggttgcagaactctttcatcaccggcggcgtgtccatcatcggcactttcacctcgataaacgccagccgatcctgccgcgaggcgtgttccagggccatttccagctgttgtgtggtttccaccgccacgctgaacggctgcgcctgggtattcaataccgccggcagtttggcgtagtcccacgggctgatgtcgttgtaggacgagttttcgccgaggatatagcgttcgatagtgtaaccgtcgttgttgatcaggaagatgatcggcttttgttcgcagcgcagcagggtggacacttcctgcgcggtaagctggaaggagccgtcgccgatgaacagcaggtgacggcgctcaggggccgccatcagggtgccgagcagcgccggcagggtataaccgatcgagccccaaatcggttggttgaccaccttgacgccgtccggcatgcgcatgccgccgatggccgcgccggaggtgccgttttccaccaccaccacgtcatccgcccggatgaagcgttggatccgccgccacagataggcctggtcgataggcgcgtcgctcggcgtcgccagcttgtcacgcggatcggccagcggtgataaaaactgcgccggcgcgtcttcgctcagatccagcagcgcctgcagcagatccgccgtcgctaccgccgggtaggaggtgttgtccaacgtcatcgagaacggctgaatatccacctgagcggcggcgggaatttgctgcgagaaatagccggtggtggagtccaccagacgcacgccgaaactcagcacgcagtctgagtgggccatgcgttcatacaattcggggcgcgacaggttgccgctgtagccgcccatccagccggcggtgttttccgggataatgcatttggcggttggcatgttggtcagcggtatggcgaagcggtgagcgacatcgataacctgctgctgcaactggtagcgatccaccatttggtcgaccaatatgatcgggcgctgcgcgcgctttattttggttaacagcgccattgccgccaattgcacattgtatttatcgctcgccggcaattgcggcgctgctgcggctgcggtgatttcaatttcgacgtcgcaaatatcagacggcagctgtaaatacaccggtttcttctctatccaggcgcgagaaataacgcgtggaatttcctgcgcggcattttccggcgtgataagagcctgagcgacggtgaattgtttaaagcagttcatgacgttgtcgaaattgccgtcgcccagggtatggtgcaatagctgatgattcttcatcgcgtgcagcggcggcgtgccggcgatgcagaccaccggcgaagattcggcataggcgccggcgatgccggacagcgcggccagatcgccaacgccgtaggtgacgatcagcgcgccggcgcctttcatccgtgcgtagccgtcggcggcgtaggaggcgttcaattcattgcagttgccgacaaacgccagccgctcgtcgttttccagcagctccagcaggctgaggttatagtcgccgggcacgccataaatacgatcgacgttcagggcgtgaagctgttgcagaatgaatgacccgatagttattttcattgattgctccggattatttatctttattttgtcaggcgaaaatcagcaaaaataaattgctggcgatgttgtgtcgttagcattaacagttatttaaagtgtcggcttgttcaagatagggttggcagccggaaaatgggcggtttgtattcggcgctttacgcgattgagtaatacataaaaagtaggggtattgcgtattggcgtgcggcggtatttttccttgatggaatatcagcagagaaacggcgccgcgttggcatttatcatgacgcagggggagttacccggtacttttgatgccgcgttaaatcctgcctggcggcacccggctgtgagtctgagaaagaaaaaccgacgctgacgtaaagggggattttggtgatccgccgcacgcttatttcaagaaactatcctgcaaccaattaaaaacaaaaaattaacaatgaggtttttttattcggtcatggttgtcagttttgctttacagatgccgcaatgcgcgccacgtcgggccggcgttaaaatacgccgtcacgggcgctaatataacgtggcggtcgtcacattctgtgggaagtgatacgtaaacttttctctacgtgcgcacggatggcgtatacctaccagaggggctcatgtcccagcggtgctggcctgagaggggggcgtgtgatgaaaggctatcgacacattctggtactgattcacgatgagcgcgatgggctgccgttgctgcgtaaaacggtggcgatggtgggtgggctgccgatcgccatcaccgtcggccaccttaacgccgactatgcggagctggagtacggcagcgatgcgctggtcaaagatcgccaggcgcaggaggtgatcgccgccaaggcgatgctgagccggctggtgagcgccgtcgaggcgccggttgcggtcaaggaaatcgtcactatccggcgctttaaggacgtcagcgatttcattcatcaggccggtatcgatctggtggtggtcgggcaccaaaatcgcctgttcggtctctattcctcttattccctggagtttgtgaatcgtctcgatgtcgatgtgttggtcaagcaccttgcccgcgagtcgtgtgcgacaaagcggacttttcccacggctttgccgcccgaaaggcgatagcatacgcaggccggtgcagcctgttaaaagttatcgggaattttccggtgctaaacttaaccaaagcacaacgggcgttggataaattagatacagcttgatcttgcctgggctatcggtaaaaatctgcggccgtatttttacaggagctttacgatgtttctcaaacggactcttttggcatgttctctggcgttgatatttcctgcactgccttcttacgctgaggttggtacagaaagtggcaataccgcgcaggctgaaaaaccgggtctatggcagcgttttacccataacgtggcggagacctggaacaactcgcctaaccacgatctctatatcccggccatcacctggcacaatcgttggacttatgatgatgagcatatcgataagtacaacgaacgcccgtggggcgccggttacggcatctcccgctacgacagcgacggtgactggcacggcatctacatcatggcgttcaaggattccttcaacaaatgggagccgatcggcggctacgcctacgagaagatctggcgcccgctggatgacaaggatttccgcctggggctgggcttcaccgccagcgtcaccgcgcgcgacaactggaattacatccctatcccggcgccgctgccgctggcctctatcggctatcagcggctgacgttccaggcgacctacattcccggcacctataacaacggcaacgtgttcttcgcctggctgcgctggcagttctaaacttcctgaattccgaaaaacggcgcggtggcgagataaaaggaacttgtcgccgcaggcggcgtcggagaggtatcccggcgcgctgcgccgattgcatgccgttatgacaggagtttcaccactatgatcaccaaacatcgtttattgctggctttggcgctgtccgcgaccctggccagcggcgccacccaggccgccgggctgatggattccctcagcagcgcggcgggcgaactgagcaagtcgggcggcgacagcagcggcggcatgtcgctctcctcgttgaccggcctgctgaacggcggcgacaaggcgttgagctccagcagcatgaccaatgccgccggtatcctgcagtactgcgtgaaaaacaacgtgctgtcggctaacggtgccgaaggggtgaaagatcagctgctcagcaagctgggcatcaccagcaccgaaaacgccaagagccaggattatcagcagggcctgggcggcttgctgcagaccggcgaaggcaagagcctggatctgaacagcctgggcacctcgcagatcaccgagaaggtgaagcaaaaagcctgcgatctggtgctgaaacagggcaaatcctttatttcatgatcaaagaacggcggagcgctccgccgttcgtttttgtataagctggaaaaatgaaaaaaacgttgatgctttccctgctggcagggatgacgatgttgcaggggtgttccgtgaaatccaacgatgcgccgccaccgccgcaggtgaaaccgatcggcatggcgaacccggccgacgtgtactgcacccaaatcggcggcaagctgaacgccaaagagaatgctgcaggccagtattctacctgtaccttgccgagtgggcaggaaattgaaagctgggaactgttccgccgcgatcatccggtgaaaaagtaaccctatgcggcgccggctctgctgcccggcgcccgctcagaattggcgatcgcctatcggctgcagctgcaggctgccgtccttctgcagcgtcagcggcatgcgccaatcacgctgtttatccaggttgaacggccgggagcggaacatgcagccggtcttgatattcttgattttcatcacgtgttccgcgttcgcattgattttcacctcgaagctgccggcgggcggaataaagacttccgccagctgttgcggcgccgctggcgtttccagcttgaccagcaccgcgaaatcgttgccctgattatccaacgtcagccgatgcaggccggatgcgggcagccgcgttggctgatgcagataacccgctgaagcgggccacggctgcccggcattgtcatgcagcggcccgccgcactgttcgcgcgcctcccgcagcggcatttcgcgcttgatggcgcgattgtaatcggcgggggcggcgagactgaactcgtcgtcatattggtgggcgcgcagatagcgcttggcgccgagcaccccaacggcgaccagcatgaagaacaaaaatatcctcaggcgatttttgaaaatcagcccgaacagcttcccggggagttgaaacagccaccttgcgatcgtcaataacatcgttttcccttagcgtccaagccgttacgtctgcggtaacttcgcttgcctcagtatagccaacatcccgcaggcgaaaatcctgcccggcgatttttcttccgctctgcattgtacgtttgtgtttgtttgtgtacatttgtgatcactttagcgtcaccggattgaaatgatgtccaaactgttaccgaatgagcgtcaccaggccattcttgacacgctccgccaacaggggcgggtgctggccctggagatggcgcagcggctgaacaccaccgaagcgaccattcgccgcgatctgcgccagctggcggcgcagaacctgtgtaaacgcatctatggcggcgcgttagcgccgacgccggccgaaggccccgttgcggcgcgcattgcgctcagcggtgacgagaagctgacgctggcgcagaccgcgctgggggtgatcggtgaagaacagctgatcttcctcgacgccggcagcacccacctgtatctggcggatctgttgccgcgcgaccggcgtttgacggtggtgaccaatgcattgagcatcgccggcaaaatgctggagcggccggggatccgcaccatcctgatcggcggcgagttggatgcgcaggtcggcggctgcgtggacgccaaggccgcggaagagatcgacggtttccatttcgatttggtgtttaccggcatctgcgcctacgacccggccggcggcttctccgcgctgagctaccaggacgccaccttcaaaaagcggctgttgacgcgcgccggcagcgtggcggtgctgtgcacccgcgacaagctcaatacctacgccccttaccccttcctgcccgccgggcgggtggatcatctggtgacggcgcgcggcgcgcacccgcagcttgagctgcaggtggcgcagggcggcggccaggtttggcacagcgatttaccgaccggagaatgatgatgaaaatagcccatgttgctctgtggacccgtgacatcgacgcgcagctggcattttggcagcgttatttcaatggtgccgcgggggaggagtatgtcagccgcaaccggccggggttcgtttcccgcttcgtcagcctggcggccgggccgtcgctggagatcatgcgcgtgccgacgttgctgccggcgcaggagcaggaggagcgggtcggttgggcgcacatcgcactgtcgctcggggatgagcggcaggtcgatcggttggcgcagcgcgcgcagcaggagggcattttgctgtccgcgccgcgctggaccggcgacggcttctacgaggccgtcattcgcgatccagacggcaacgcgatcgaaatcaccgcctgatcactcttcttcaatgctggcgaattgctcgcccagatagtcgagcagcagccgcaccgccggcagcaggccgcggcgcgacgggtaaaccgcatgcaccacgccgccctgcggctgccagcccggcaacagttgcaccagctcgccgcgcagcatgtcgtcgcgcatcatcatcgccggcagttggacgatgccggcgccggcgatggcagcggtgcgcagcatcagcatgtcgtctgtgaccagccgcggcgtgtgctcccactccacccgttcaccctgcgggccgctcagccgccattggtgctgaccgcgcgcggggccgagatcgagcgtcgggtatttacgcaggtcttccggcgtgtgcgccggcccgagggtgcgcaccagcgccgggctggcggcgacgcaccaggtgcgctgcgccaggattttcagcaccagatcgctgtcctccagcggcggcggccgcacccggatcgccagatccaacccttcccccaccacgtccacccggcggttggtggcctccagatgcaccgtcaccttgggataatcggccataaaggccgccaccatgctgccgacgcgggtgtgcaggatcgccaccgggcaggacatgcgcaccgtgccgcagggctcggcgcgcgtctgctcgatcgcctgctgcgccgcttccgcttccaccagcatcgccttgcagtgcgcgtaataggtttggccgacctcggtcaccgagaagcgccgcgtcgagcgctggatcaggcgcacgcccaaccgctcctccagcagcgccacgcggcggctgagcttggatttgggaatgcccagcgcccggccggcgggggcgaatccctggtgatcgaccacgctggcgaagaaaaacagatcgttcagatcggtcagcatcgtatcccttatcgttctatcagtagaacgctgagtgtacatcttgcctactactgcagcaaaccccggcggattaaacttctgacatcaacttaaggccgtgaggtctgaaacgggagttcaagatgaaaaaaatcctcggtattcacaacagcccggaagcacactgggtcggtaacggtttcctggtgaattcgctgttctcttataacgatttgggggcggaaatgagcccgttcctgctgctggatcacgcggcgccgaccaaattccgttccgcctccggcacccgtggcgtgggtcagcacccgcatcgcgggtttgaaacggtgaccatcgtctatcagggcgaagtggaacaccgcgactcgaccggcagcggcggggtgattggccccggcgacgtccagtggatgaccgccgcctccggcatcctgcacgaagagttccattcgcgggacttctcgcgcaacggcggcaccatggaaatggtgcagctgtgggtcaacctgccggccaaggacaaaatggccgagccgggttaccagacgctgctgaacgccgatattccggtggtcccgctggcggacggcgcagggcaggtgcgggtgatcgccggtgacttcggcggccatgccggcccggcgcgcactttcagcccgctcaacgtgtgggatatgaagctgaatgccggccataccaccacgctgacggtgaaagaaggccatacgctggcgctggtgatgctgcacggcgcgatcctggttaacggcgaagatgtggtgcgtgaaacccagatggtgcgtttcgaccgggcgggggactcgatcactatcgaagccaacaacgacgtcgcgctgttggtgctgagcggcgaaccgatcgatgagcctatcgtcggctacggcccgttcgtcatgaacagcgaagcggaaatccagcaggcgttccgcgatttcaacagcggcaagttcggcagcatgaacgccgaagcgagcgccggttgaaccttggcatctggggcgggaagtgttctcggttccagatgccacacttaaacctcaacgccccgccacaccggcggggcatttcatccgcaacatcaaaccccacaggagtaaaaccatgactgcaaattacaaacgcctcgacaaagatcaggccgccgtattgctggtggatcatcaggcagggctgctttcgctggtgcgcgacatcgatcccgatcggtttaaaaacaacgtgctggcgctgggtgatttagcgaagtatttcaacctgccgaccattctgaccaccagttttgaaaacggccccaacggcccgctggtgccggaactgaaagcccaattccccgatgctccctttattccgcgccctggccagatcaacgcctgggacaacgacgacttcgtcaaagcggtaaaagccaccggccgcaagcaactgatcattgccggcgtggtgaccgaagtgtgcgtggcattcccggcgctgtctgcgctcaatgaagggttcgaagtgtttgtggtgaccgacgcctccggcaccttcaatgaactgacccgtcagtcggcctggagccgtatggaagccgccggcgcgcagttgatgacctggttcggcgtcgcctgcgaactgcaccgcgactggcgcaacgacatcgaaggcctgggcacgctgttctccaaccatattccggactaccgcaatctgatgaccagctacaacacgctgaccaacggtaagtaacgcgacggccctttactcaacctttcgcctttcatcacgttagacgcgggatgtaagcaaagcgcagcggggcgaaaaggtagcgaaaagcggctttctcattggccgggggcggggtagcgtaatcccgaacccggcaaatgaggctaattcaatgaaacaagcaatcaagatcctggcgctgccctgcatgggcatggcgctattgttcagcgcgagcgcgatgtcggcgcctgagaagcctgcggccaacgcgttgccgcctttgatggatgcgccgatgcgcatgccgcctttcccgggcgggcacccgcccaagccggggttctgccacggcggcgagctgttctgcgccacctcggccagcgacaatccggtggaaaccatcaacaaactgacggcggtgatcccggcgggcagcgccaaacattacgaagtgcgcgtcgcggtggtggccgtgcctgacgcaccgcctgcgccttaacgggccctgtcatcccgctctggcctgggcgcaccaggcgcgttaggctaaggagagcgtttttcgggaggcgggatgacccctttatcacagctgccttatctccagcccggcgatcgcgtgctgttgttcgacggcgaatgcaatctgtgtcacgggctggtgagatatttgattcgggccgatcggcaacggcgcattctgttggcgacggtgcaatccgtcgaaggacaggcgatcctgctggcgttggggttgcagaccgatcgtttcgattccgtggtctatgttgagcaggggcgttattggctgcgttcggcggcgttgtttcaggcgctgcgccaattggcttggccataccgcgcgctggcgctggggcgttatctgccgtcgaagctggcggacaaggtgtacgacgcggtcgccggcaatcgctaccggctgtttggccgcaacgacggcgccggtctgccgggtgccgatcagcccgggcgctatctgccgcggcgacgggaaccgccggcctgagctttacgcttctttaccatccaaccgcttgaaatatcagcactccagctccatataatggaacattcaaccaacaaggagcgcgtatgggaatcagtgaagaagagcgcattcgccgtttgacccaggagaaaaacgacatgggcaatacggcgaaatgggtggcgatcgtttccgccgtgtactttgccttgatggtgttttacggccacccgaccggcgtgttggcgatgtcgggcgcggtgttcatcgtgtcgaccaccacctggctgaaaaagcgtaagaaggtcaaatcttatcgcatggcattggccagaatcagcgacgatcagccctgatagtcgccgcgctttagtgtatacaccaggctcggcgctgcgccgggcacgtcatccagcgtatccacccgccgcatgccgatcttttccagcactcgccacgacgcctgattctccgcgcgcacaatggcggaaatttcctccatcgccaatccgacaaaaccatattgcagcgaagcccgcgccatctcggtggccaaccccatgccccagacgcgagtatcgaagcgatagccgaggttcacggtgcgctgtgcgccgagcggtttccaggacaatccgccaaagccgatgatccaatccggccgttcgcgcagggcgatcgcccaggaaccgtaaccgtgttgttgccacccggaaattctctcttgcagcgccgagatagcctgcgcttcgctggtgagcgggccggcgggattgaaacgctgggtttgcggatcgccgaagatggcgtagaagcgttcgagatccgccatcaccggcgggcgcatctgcaggcgttcgctgaaaaaagggtctgaaggagtaaggctcatcatcgtttctcccggctggataaatgaacagtgttcactgtagaccagattggtgaaacggggaatccccctctgcgggtgagagggggcgaagggaattacaggaaggagtcgtcgtcgtcgctgtaatcgtcgtcggcgtaatccgtgtcgtcctgatagctggcgttctggaagccgttgtcctggttcaggaagttgccaccatcgccgttgttgaaggtatcaaggttgttggaggcgtcgaaattgcgcattgcgctgtcgtccagcggcgccggggtttcctcgataatatttacgatttcctgtggttgcgaatggcggaacatgccggtcagcatgtcggccaacaccacgccgccggcgacgcccgccgccgtttgcaaggcgcctcccaggaagccgccagcgcgtgagggcgccgcctgctgcggttgggcataggcaggctgctgctgcgcgtagcccccctgctgcgcgttgttccaggccgccgtattttgctgctgcgcctgatactgttcacgcgggcttggcgtgcggctgccgccgccgaacagaccggccaggaagccgccgctgctctgctggccgttggcggtttgctgcagctgcgccacctgggcctccagctctttgacccgctgatccatctgcttgagcgccgcttcctgaatgatcatcgcctgcgccatgtaataaggggcggaaggctgctcgcgaatatgctggttgatttgctgctctgcctggagatcccgtgggcccgtcttggtctcggcttctttcaggcggccaaacagaccatcgataaggcgttgttcttcggattgcataggagtacctcaggagataaataacggtgctggatgatcattatcatccgtaacaatcaccctagcgcgtttacatgaaccaataaataaatggcgggtaaacttgcctatgaatttgttaccaattgcggcagcgggatcagcatcaccagcttcagaccggcgtgctctgccgggtggaaggtgagctggcgatagcgcagcgcgccttgctgaggatgctcgaaggttctttcgccgccttcgcgcgccatgacgtcatgttgcttccaccagtgattaaagtctgcgctgttgtgcgtcatgttgcgcacgaaggcgcgcatctcttcggtattttgatgatggctggtctcggcgcgaaactcggccaccacgcggcgcgcgcgctcttcccaatcgctgaccagcgttttcgccaatgggtggaagaacatgaagtgcagcaggttggggctgttggccacatccagccagccgctgaacagcgccgccgcctgcgggttccaggcgacgacgttccaggtcacgtccagcaggtagcagggcaccgtcatctggtgcacgctttgcagcaccgcgtcgttggcggtttcgcggtgtgtttcctgctcggggtcggcgatgcgcgccagggtaaacaggtaatggcgttcggccgggccgagccgcagcgccttggcgatgcgtgccagcgtatagggggaaatggatacctcgcggccctgttcgatccaggtataccaggtggcgctgatgccgctgatttgcgccagctcttcgcgccgcaggccgctggtgcgacggcgcgaggagctgggcaggccgagcatttccggcgtgatgcgttcgcggtgcgcccgcaggaacgcgccgagggcctttggcccggataaggcttctgatgacatagcgtggtacctatttataccaggataactgctcatattgtacccgtatagtagcctgattatagtagccgaaagccttcaggcacaggcgcaagccggataataacgggagcaaacatgagcatcagcaacagccataaaaacgcggtagaccggcagttcggcgagcaggccaacgcctacttaaccagcgcggtacacgcgcagggcaaggatttgcaacgccttgcacagttactggaaccgcacgccggcgcgcgcctgctcgatctgggctgcggcgccgggcatgccagcttcacggcggctgccagggtagcgcaggtggtggcctacgatctgtcggcgcaaatgttggcggtggtgaagcaggcggcggcggaaaaaggcctgaataacattcagcagcagcagggcgtggcggagtctttaccgtttgaagacgccagcttcgatctggtcatcagccgctattcggcgcaccactggcacgacgtcggccaggcgctgcgcgaggtcaggcgggtactcaaaccgggcggcagcgcgatctttatggacgtggtctcgccggggcatccgctgctggatatctacctgcaaaccgtggaagtgctgcgcgacacctcgcacgtgcgcaactatgcgccgggcgagtggctgacgttgctgaccgaggccgggctgatggtacgcgaagtgacggcggatcgattgatgctggagttcggcagttgggtggcgcgtatgcgcacgccggcgcatttcgtcaccgcgatccgcgcgctgcagcaaagcgtgtcggaagaggtggcggcgcatttcgccattcagccggacggctcctttaccagcgatatcatgatgtttgaagtgacgaagggctgaaagcaacggggcagccgatgaaggctgccccgtgaaacgcaatcgactgcgatacgcttattttttgtcttccagcaggcagcggtagatcaggccgccgataatgccgccgaccagcggcaccagccagaagacccacagctgctgcagcgcccaggtgccctggaagatcgctacgccggtgctgcgcgccgggttgacggaggtgttggtcaccgggatgctgatcaggtggatcagcgtcagcgtcaggccgatcgccagcggggcaaagcctgccggcgcgcgcttgtcggtcacgccgtgaataacgatcaggaagaaggcggtcagtaccagctcaatcacgatcgcggcttgcagagaataaccgcccggtgagtgttcgccgtaaccgttggaggcgaagccgcctgcggtggcgtcgaaaccggctttgccgctggcgatcaaatacagcaccgccgctgcggcgatgccgccgatgacctgagcgataacgtaaggaataacgtctttcgccgcgaaacggccgccggcgaataagccgacggtgacggccgggttaaaatgcccgccggaaatatggccgacggcataggccatcgtcaccacggtcagaccgaaagcgagcgcgacgccgaggaaaccaatacccagctgtgggaatgccgctgccaatactgcgctaccacaaccaccaaacaccaaccaaaatgtgccaaaaaattcagcaaaaagtcgctttgacatagattccatcctgcggaatagactaacgggcgttagcactaaaaactatagaacagctttttgagttcatgcagatattctatagaattttcttaatgcaccttgaataacggcggtattaaatccccggtattttattttgtctatgagaaaaacaccgtttttccacgtgccgacgcgcgtttgccgatttttttatctttgctataagaatttaccctaagcaaaatggcgggctattttcgggtggttttttccagcggttttatccattcaatacgctcaggttaattgctaatttctatttgccagccaaccttattgcttgttttacatttgacgaagcgcctgttgtcatctaagtgtcatgctaaattaatatcttcttctgcctgataacgcttcattcaacctcgggtaaaaaacatgagaataaaatcgctctccctgctgttggcttcgctgtttccggtattcacctacgctgcagatattgaggtggcgcgttatgtggtcggcttccccggcggggaacgcgtcgcctatcagggggcgtttgccaagcatttcccgcaggggttgccggtggggatcggctcagggctgtcgttcaatcgcaagcagggcgacgatctggtgctgacgacgctgaccgatcgcggcccgaatgctgatgcccctgcggtgggcaagcaagaagccaagattttcgccaatccgcaattcacgcctctgttgatggacattcgtatcggcggcggcaaggccgtggccgagaatgcgcggcccttgcatgacgaaaaagggccgattagcgggctgccgctgccgagcgagctgattggttccacgaacgaagtggcgttgaacgacgcgctgcaaccgctgtctggcgatcgccgtgggttggataccgaaggtatcatcggtgacggcaacggcggctattggctgtgtgacgagtatggcccgtttctgatccatgtcgacgacaaaggcaaaattctcgccaaatatggcccaacgccgcaggccggcgagcaggcggtggcgagcggtttgccgaacatcctgaagtggcgccagcctaaccgcggttttgaggggctgacccggatgccggatggacgcattctggcggcggtgcagagcacgctggatgttgatggtaaaagcaaaaacaaggcgcagtttacccggctggtgagcttcgatccgcgcagtggcaaaactgcgatgtatggctatcccatcgatatcgaccgctataaaaaagccaaagacgccaagattggcgatatcgtggcgttggacaaccagcgcatcctgttgattgaacagggaaccgataaagataagacgatgatcaacaagatctatctggtggatctcgcgcaggccagcgatctgagtacgtttgacggccagggtaaagcgctggagttcgacgatgcgcaagagctggctaaacgcggcgtgaagctggcgcagaaacgggaagtggcggatctgcgccagttgggctggcgccaggagaaagcggaagggttggcgctgatcgacgatcgcacgctggcggtgatcaatgacaacgatttcggcttgcaggcgaagctggtggatgcgtcgccaaagagcaaaaaaatcggtgactaccagctggagaaaggagggcggttgagcctcgacggcgacaagaccgatgcccgtatcgaattgcgccctctggagcagccggagtcgctgagtgagctctgggtgctcaccttgccgcaacccttgaagtgatcgagaaggggcgacagcgcccccgtcagaccgttgaaaaaggaggaaaaaacgtggtttttcctcctttgtggccatcagccgaaaatcaataaattgattttccttgtttttttatccgctgctctctgcaaacccggcaatggcatgaggtttgtcatcaatctcacagcgggggcggtgacgcccccgtttgcttcaggtctccgcgtgccgctgcggcgctctgccgcgcgagatgctctcccacaccgccaccaccaccatgatcagcgtcgtcaggccattgaccatcagcagatcggttaaataggcggcgggggccaataccgccagcgtcagcagcccaaccaggtgcgacagcgggaagcggcgatacaccaaccgtttatacagcgcgttggcgaacaggtaaatcgccgggccgagcagcagcaccgccgccgtggcgtgttggatgcggccgtcaggatgggcgatcaccagctcgttggccacggcgcagacgatgatggctcccaccagcgcgacgtgcacgtagtggaaataagcgcccagctggccggggttttccgcctggctgatggcgtggctgccggctttgctgctggtgtcgaagtaaacccaccacatcgccaggctgccgagaaaggccaccagcgaagcgatgagcaccggcaggctccagctttccatttcgctcagggtggcgccggtgatcagaatggtttcccccagcgccacgatcacgaacagctggcagcgctccgccagatggtggccttcgatggtccattcgctgctgctgtccgagcgccccagcaccggcaggcgaaaaccgaacatcggcgagacgtattcgcacaagacggcgatcgcccacagcgccaggcgagtatggccttccgccagcccgccggcgatccagaagacggcggagatgcacagccagccgaggatgcggcgaaagttttgtttcaacgggtggccaggcgccagcaggcgcaacaccgtgacagagcggccgacttgaatagcgacataaaacagcgcgaagatcaggccgcgctcgccaaacgcctgcggcagcgcggcggcggcgaacagccccagcagcatgatcgcgaacagcagcaggcggatctggcgggtatccggattgaaccagttggtgacccaggcggtgtattgccaggccagccagacggcaaaccacagcagcagggtttccagcgcgccggtcagcgtcaggtgatgcaacagatagtgggaaagttgggtcacggcgaaaacgtagatcagatcgaacagcagctcggaaaatgagaccgaagcgccctgaccgtcacgcacgcgcagcaggttttgcgacataagcgttcttccttaaaagggtaagccacaaaatcagcgtagctcagcgcgctccggcgggtaaaaaatcttaaatagacgcggcgcgcatgctttatctcgcaccgtctttaattgttcatcaaataggggtaaggtgaggtctataaagtcattcccgcctgaaaatacacacccgctcttacttcctccttattctcctcacaatgattgatgttctttacgttgcatgacgtccgttttcattggctagcggataattaacatcactgaccacgagctaataaacaagaacacctggagtcaatcatgaaactcatcccaagcatcgcagccgtattgatcgccgccgcttctttctccactttcgccgcgccgctgtcgtcggtgaaacaggtcaacagcgagcaggccgccaatctgcaaagcatcggcgtcgtgtcggtttccggcattagcggctcaccgcatgatgccatcaccgcccttaaagaaaaagccgcggcggacggcgccagccattatcgcattatcggtctggacacccccggggattccagcaactggcgcggcaatgcggaaatttatcgctaagcattggtttttttacgctctggccgcggcaacgcggccaataaaataaacggtcgcaataattatctgaatagtcggtgtataaacgatttattctcaggtcattattacggccgtttttctttgcgtgccgttgatgaggttgcattttattacaactgtgtctgccgctttcggaatcatgttaatgattacttaagaaattcggctcacattgagggcttaacccaaggaggcctcaatgttaaatgcgacccggctgcaactgatgaatcacttcgcttacctgcagcaatttatggcttcaccgcgcaccgtcggtacgctggcgccttcttccccgtggctgtgtcaggcgatgctgaatcaggttgaatggacccgggcgctgtcgatcgcggaactgggcgcggccgacggggtgttgaccaaacgtattctggggcggatgcgcgccgatgcggcgctggaggccttcgagatccaaccccatttcgtgcatcggctgcgcgggatagacgatcggcggctgaaggtgatgggccattcggcgacccggatggccacggattacgacgtggtgttttcctgcctgccgctgctgtcgatcccggtcaggatcagcgtgcgcattcttcagcaggcccggcagcggctgctggcgcgcaacggcacgctggtgctgttccaatacagccacctgtcggaaaaattgctgtcgcgctattttcactggaagcgcctgcgggtggtgcgcaacttcccgccggcgctggtgtatgtctgtacgccgcgttagctacagcgttttcgccatcaccaccacctcttcgtcatgctgccgccggcgctccagaggttgccaaccccagccggcgtacagcgcttccgacttgtcggtgatgagatgcagaaccgagtgatggcgttgccgcgccgcctcgacgatggccatctccagacagtgggcgatgcccttgcggcggtgatcgggatgcacgaagacgccggccagccacggagtgagatcctggcgctgatgatcgtcgctgggccacaggctggccatgccgaccggacgatcgccgtcgatcatcatcagcgtcaggtgatcgtcgcttggccggctgcattgggcgaaacgcagctgggtgcgcgccagcgaaccgccgcgctgtgacccccattggccgaaagcccaggcggcgcacacatcggcaaactgcgggcactccgacagcggaatgatgcgttgagtcatggaggtctcccggtttttttgctgtttccccctcctatttaaccgatttttccgccatttttttaactttttaaagccgctattttagcggtttcgccgtgtttgccgcgcgcccggcgccgtttcccggatttcttttggcaatggcggcgtgggattgcaagtgctaatgagagtgattatcatgcgcacactatttcccccgtttcggctcaatcatgcgcacttccctcattttactgctgctttccctgtggttcggcatgttctccgcccaggcgaagacggtaaccgacatcaccggccgccaggtcgcggtgccggacaacccgcagcgcatcgtggtgggggagagccgcatgctgtatacgctggcgctgctggagccgggcaacccggcgcagcgcatcgtcggctggccggcggatctggcgcgctttgatgcgcaaagctggcagctgtatacgcagaagtttccacagatagcccagatccccgtcatcagcggcaataactttcgccaggtcaacatcgaaagcctgctgcagctgaagccggatctggtgatcctggcgcgctacgcgcgtgaagacggcgacaacgatttgctggtttccgcactgagcaaggccggcgtggctgtgatctacgtcgatctgcgcatcgatctgctgaacaacaccgtgtcgagcgtgcggctgctgggcgaagtgcttaatcgccagcaacgcgccgagcagttcatcgcgttttatcagcagcatatgacggtgatccggcaacggctggcgggctatcaggggccgaagcccaaggtgatgctgcacctgcatctggggcggcgcgacacctgttgcaccaccgccgcgcacggcaacctcggcgatttgctgaccttcgccggcggcgacaacatcgccaacgccagcgtcaaaggggtgtatggcgagctgaacccggaaaccattctgagcgccaatcccgacgtgtacctcgccaccggcatggctgggccgcagggcaaacggctgtccgatctgcgcctcgggccgcaggtcagccgacaagaggccgccgacagctttcgccaactgatcgccaaacagccgatgctggccagcctgcaggcggtgaaaaaccaccgcgcctggagcgtctggcacaacttttacctcagcccgtaccatgtcgtgttggtcgagatgttcgccaaagcgttttacccggatctgttcgccgacatcaacccgcagcagaccttccaacagctgtatcagcagtttttgccgttacctttttcagggacctattggagtcagttagataatgaataacaacaagcgcggctggtggtgcgcattgcctttggcagcctgcgcgacatcgccggcgtgggcggcggaaaaagccgcgccgcaggaagagagcctggtggtggtcggccgcaaagacgccgacggcgtgcagagctatcagccgttgaccagcgttaccggtacccgcagcgaaaccaacctgctgaacgtgccgcaggcgatcgacgtggtgccgcaacaggtgattaccgatcaggcggtcagcagcctggacgaagcgctgtacaacgtcagcggcataacccaggccaacacgctggggggcacccaggacgcggtaatgaaacgcggcttcggcgacaaccgcgacggctccattctgcgcgacggcgtgcgctcggtgcaggcgcgcaactttacgccgaccaccgagcgggtggaggtgctcaaggggccggcctcgatgctgtacggcatgggcgagccgggcgggatgatcaacatgatcaccaaaaagccccagctgcagcagcatacccacgtggaaggctggggcagcagtttcaacggcggcggtggccagctcgacgttaccgggccgctcggcacgtcggggtttgcctatcggatgatcgtcgatcacgatgaaaccgattactggcgcaactttggccgcaatcgccagacggtgatcgcgccctcgctgatgtggtacggcgagaacaccaccgtgcggttggcctatgaacatatggaatatctggtgccgttcgatcgcggcaccattatcgattcgcgcaccggcaaaccggtgaatacgccgcgcgatcgccgtttcgacgaggcttataacgccacccgcggcgatcaggacagcgtcactctgcagatcgatcaaacgctcaatgagcgctggaaaagctcgctgacctacgcctacagccgcaacagctacagcgacaaccaggcgcgcgccacggcgctggacccggagagcggcgcattgagccgccaggccgactcgaccgcccatgccgtcagccacgccaacgcggtgcagctgacgttcaatggtgacgtggactggggcagcatcaaccaccagatgctgttcggctttgattttgaagataaccgtacctaccgcggcgacatgatccgcggtaaaaagaacagcgatttcaatatctatcatccggtatacggcctgatgccgccgtcgacggcggtcagcgccaaagacagcgaccagcgggaaaacctcaccagctacggttggtttatgcaggattccatccagctaaccgataaatggctgctgatgggcgggctgcgctacgatgctttcgacgtctatgccggcaaggggcggccgttccagaccaataccgacagctcggacggcaagctggtgccgcgtgccggagtggtctacaagctgacgccttacgtgtcgctgtacagcagctataccgagtcgttcaagccgaactcttccatcgccacccagattgattcgctgccgccggagcagggcaagtcgtgggaagtcggcggcaagctggcgctgccgaacggtgttaccggcacgttggcgctgttcgacatcaccaagcgcaacgtgatggtcagtgagctggtggcgggcgaaaccgtgacgcgcaccgccgggcgcgtgcgttcgcagggcgtggagctggacgtggccggtaatctcaccgactcgctgagcctgatcggttcctatgcgtataccgacgcacgggtggtggacgatccggacaacaagggcaaagagatgaccaacgtggcgcgccacaccgcctcgctgttcctgacccaaaacctgggcagcccgggtctctacagcggcgatgaggtgcgcattggcgccggtgcgcgctacgtagggcgccgcccgggtgacgccgccaacagtttctacctggataactacaccgttgccgatgcgttcgccgcttacaccatgccgatcaacggctatcgggtgaaatggcaactgaacgtgaagaacctgttcgataaaacctactacccatccagcggcggcaatttgcgcgtggcggtgggggaaccgcgtgaggtggtgctgcgcggcagtgtcgatttctaagccacgggcggtgaaatttgcttaaataaccgccccaacgttaaggagaacccatgagcctgcagattcgtttggcgcagcagcgggatatcgcgcatctgatggcggttgaacgctcggcggcgcagttgtttcgccaacagccggaatggcgctttattgccgaaggcgaggtgatggccccgcagcagcatgccgcgtttatcgccgagcgccgtgaatggctggcggaaagcgacaacggcgagtgcgccggtttcatcgccgtgctggctcagggggaagattggcacatcgccgaattgtcggtcgctggcacctggcagcggcagggcgtcggccgccgcctgatcggcgcggtggcggaagaagccaaacggcagggggccggccgcctgacgctcaccaccttcattgaggtgccgtggaatgcgccttactaccggcggctgggattccggccgcttgagggcgcgcagctcacggccgccttgcggcggcatctggatgaggatctggcgcacggctttgccgtcggcagtcgctgtgccatggaatttacactatcgtaaatattgaaatacagagcgggcagggtatgatgctgccaccacgccatcgcacccgctcggcattttggtatgcaatgcactcaagtcaccgcataagggacaacccgtaatgacacaaaccctgttcatgataggcgctcgcggagccggcaagaccacggtaggccgcgcattggcgctggcgttgggctatcaattcgtcgataccgatctgtttatgcagcaggcggcgcagatgagcgtggcggaaatggtcgagcgcgagggttggctggggttccgccgccgtgagaccgtcgcgttgcaaaccgtgactaagccgtcaactatagttgccaccggcggcggcgcgatcctggcggaagagaatcgtcagtttatgcgccagcatggcaccgttatctacctgcgcgcgccggccagcgtgttggcgcagcggttggaagagtacccggaagatgcgcagcgcccgacgctcaccggcaggccgatcgccgaagagatgcgcgaggtgctggccgcgcgggaagcgctgtatcaggatgccgcacattacgtgatggacggcgccgccgatccgcagcgggtggtggaacaaatcctcgcggtgctgccgcgtgagacggtgaaataaccttttcttctcttcgggcgctgtgcgcccgtttttctattccgtttgccgagcggccgcaaagtaggccccgggcgtgacgccgaagcggcggcgaaaggcggcgatgtaggcgctgacgttatcatagccgcaggcgtcggccacctcgccaaccgctttgccgcgtgataacccctccagtgaacgcaatacccgcgcctgctggcgccacagcgcgaagctgatgccggtttcctgcagaaaacggcggctcagggtgcgcgggctgagcccggcccagatggcccagtcgcgctggctgcgcgggctggcgggatcgttcagcagcgctcgggcgatgttcagcaaccgggcgtcctgcggcagcggcaattgcaacggcgcgcggcttgccgcgtgcatttcgtccagcagcacctgcagcagccgccgttgcggcgcactcagcgggccggcggggaactgcgcgatgcgctccaccagggcctgcaacaacgcagaggccgtgaacagttgcggcagcggcggcatctccggcacgctttccatcggcagatacaggctccagcccgccacgtcgccacaggccagcgcctgatgggcgcatcccggcggcagccagcccagcgtgccgccggtgatcgcccattgccggcccgggagttccattgccagcatgccgcgcgtcaagagatagatctggccgccttcgtgccggtgccagggcgtcaggtgctttttttcatgctgaaggcgttggctgcggatctgcgtcatgttggccgtttaacgttattgaaagtcttgatgtggttattatgccatcgcctggccgggataggatcgccgttcaccctatttcggagaaatgtgatgactcaacttaccccgctgaatctggtgctcgatacgctgcagcagatcgtcgccagcccggagcatcggccggcccagctcgccgcccgcttcagcgcaggctaccgccagcaggtggatggcaaggtgctgcacttcgagcagtttgagcagcatatggcgctgctgaagcggcaaactcgccgcatgacgctgagcgtgatcgcggcggcggagcagggcgaggcggtgctgacccaccatctggtcgaggtggaaaagcgtgacggttcccgctgccgcgtgcgggtgttggcgcacttcaccgtgcgtgaagggcgtatttgcgcctgcgacgaattgaccgagctgttgacgggggctcccggcgatcgcgatcttggttcgcgcgtgtcggaatgagggcggctgctatacttgctactgtgtgaaacacacgggagaacggcatgcgcgaaaatgatcaacctgcttatccacggagtgcccgcgtcgtagaggtgtttcggggggacccgaacctgcatctgcgccgttttgaagtgcgcaccgacgacattgagccgaatacgctgctcagtgaacatgaaaccgagcaggaagcgctcgacgccaagcaccgctatgaagacgaggcgctagagcactgacctgcagcccagcggaaaccggcgtcaggccggtttcctgtttatccccccgcgttagcacatatttcccagaacaatattgataatgataatcatttatgtgatttttatcgcccctattgggtgtttcacttctgggaaaagagatgtccaattccgagttgcaggcgctgtttctgcgccatatgcggccgctgcaagcctatttgaacgccaaactgcgcgaccctcagctggccgcggatttggcgcaggaaagttttacccgccttaccgagcaatatccgcagggtaacattctcgatatcgaagcctacctgtataaaaccgccaaaaacctgatgttcgaccatctgcgccagcagcagcggcggcagaccgaagcggtcgaagacgacattctggcgcagtatccctccggtgaaccggcgcttgaacaactggcgatcgatagccaattgctgcagctgttgcagcaggcgctggcggacatgccgccgcgcacgcagcagattttccgccttaaccggctcgatggcctgacccaggcgcaggtggcggcgcagctgggcgtgtcgctcagcacggtggaaaaacacctggccagcgcgctcgagcggctgatggcgcggatggaagaacaataatggcaatttttttacgggtttatccgcgctcagacgtcttaacctataaccagaaaaaacagaggtctatgccattatgaaaccgctaaccgcacaggcgcgacagcaggcggccgcctgggccgtgagcctggccgaaggggcgctgccggccgatcggcggcgagcgttggacgcctggctggccgccgatccgcagcatccggcggcgctgcgtcaggctcgcctgctgtggacgacgctgggacagctgccgcctgagcagcggcaggcgttacaaccgcaggtggcgacgctgaaaacgtcatcccatcgcaggtggccccgctgggcggtggcggcggcggtggtgatcgccgtttccttcggcgtttatcgcgggccggatctatggattggcatgcaggcggattaccaaaccgttcgcggcgaggtgcgcgaagttgcgttgccggacggcagccgggtggcgctggacagcgacagcgcgatcgcactggcgtattccgcaggcgaacgcaaggtgcggctgcttagtggcgccgcctattttgtcgtcgcgccgttgggcgggccggaaagtcgcccgttcagggtggaggcggaaaacggcgtcacccaggcactgggcaccgagttcagcgtggcgcgcaccgagcagggcgtcgacgtcagcgtgcatcagcacagcgtgcgggtaacgcttgagcgcggtgagcgttcgctggtggtcgcgcaacgccaggcggcgcattaccgcaacgggcagctgcagctgacgcggcaaacggccggtgatgacgcctggcggcgcggctggctggtgatcgaccgccaaccgctgacgcaggcgctcgcgcagctcaaccgctatcgcgagacccgcatcgtagcgatcaatcccgaactcagatcgcgtacggtcagcggcgtgttcgcgctcaataaactcgacgacggcgtcggcgccattcgtcaggaactctccgcccgccagctgaatctccccggcatcacgctgctttactgagcggtgcaggcgggccgggatgcctgtttcgccgctattttcactttctgtaaaaaatctttacgggtttttgcctcccggaacgtccttatgtttaaacgagattgatttccattatcacttggtttgacattctttcgggtggaacacacacgcatgcttattcacaagggaaccacgccggccggccgcttggccacggcggtacgcgccgcgctggcggcgatgatgttgactcagccggctgtggcgctcgccgtccaggctgaggcgaacggtgcgcaggccgcacagcaaaagcatttcaacattgcggcgcagccgctgcagagcgccatgttgcgcttcgccgagcaggccggcatgcaggtgtttttcgacgaggtgaagctcgacggcatgcaggcggcggtgctgaacggcagcatgagcgttgaacagggcctgaggcgcttgatcggcggcaatccggtggctttccgcctgcagccgcaggggcagatcgtattgagccggctgccgacggctaacgtagagggcggcgcgctggcgctggacagcctgacggtgctgggcgccggcggcatcaacgccaacgattgggtttacgacgaaccgcgctcggtcagcgtcattagccgcgaacagatggacaaccgcccggcgcggcacgcggccgatattctggaacagaccacgggggcctattccagcgtcagccagcaagatccggcgctgtcggtcaacatccgcggcatacaagactatggccgggtgaacatgaacatcgacggcatgcggcagaattttcaaaagagcggccatggccagcgtaacggcaccatgtacatcgattctgaactgctgtccggcgtgaccatcgacaagggcaccagcggcggtatgggcagcgccggcacgctcggcggcattgccaccttcaataccgtcagcgcgagcgatttcctggcgccgggcaaagagctgggcggcaagctgcacgccagcaccggcgataacggcacccacttcatcggcagcggcatactggcattgggcaacgaaaccggcgatatcctgctggccgccagcgaacgccacctcggcgactattggcccggcaataagggcgacattggcaacattcgcatcaataacgacaccggcaattacgatcgctacgccgagagcatcaagaacaacaaaatccccgacacccattaccgcatgcactcgcggctggccaaggtgggctggaatctgcccgccaaccagcgcctgcagctgagttatctgcagacccagaccgcatcgccgatcgccggcaccttgactaacctgggcactcgcccgccctacgaactgggctggaagcgcaccggctacaccgacgtgatggcgcgcaacgcggcattcgactacagcctggcgccggaagacgtcgactggctcgattttcaggccaagctgtattacgtcgatactcaggatgacagcgacacctacagcaccagttcgctgctggacaacggctacgcgacgcgcacccgtctgcgtacctatggcgcacaggcgcaaaacacctcgcgcttcagcctggcgccggggcatgacttccgcgccaattacgggctggagttctattacgacaaagccaccagcgactcttcccgccaaggcatggatggggtgacgccggccggcaaccgttcggtagccagcctgttcgccaatctgacctatgactacgacggctggctgacgttggaaggcgggctgcgttacgaccgctatcgcctgcgcggccagaccggtctgagctacgccgacttcccgtatacggcggagaatccctgcaaacagctgcggctgcgcaactgcctggcgacgaccacgcagcaggagtggaacgccgatcgcgatcagggcaagctgtcgccgacgctggcgctggcggtgcgccccggcgtggagtggctggagctgtataccacctacggcaaatcctggcggccgccggcgatcactgaaacgctgaccaacggcagcgcgcacagcacctctacgcaatatcccaacccgttcctgcaggccgagcgctcgcgcgcctgggaagtggggttcaacgtacagcagcctgacctgtggtttgagggcgatcggttggtggccaaggtggcctatttcgacaccaaagtggataactacatcaacctggcgattaaccgggacaagccggggctggtgcagccgagcatcggcaacgccgcctacgtcaacaatctgtcgaaaacccgtttccgtgggctggagtaccagctcaactatgacgccggggtgttctacgccgacctgacctacacccacatgatcggtaaaaacgagttttgctccaggaacgcctggctgggcaatcgcctgcgttacggcgccaactcccggccgggcaacttctacgcggagcaggatccgacggcgaatgacgccgtgtcctgcgacggcggctcgcagttcggcaccgccgcttacctgccgggcgatcgcggttcggtgacgctgggcggccgggctttcgatcgcaagctggacgccggggtgaccgtgcgcttcgcgccgggctatcaggacagctcggtgccgtccaactacccgtatctggccgactggccgaaatacaccctgttcgatctgtacgccagctacaaactgaccgacagcctgacgctgcgcggctcggtggagaacctgaccaaccgcgcctacgtcgtcagctacggcgagacgctggccaataccctggggcgcggccgcagcgtgcagggcggggtggagtaccgtttttaagcagtaaaagggcgttgctcatcgttgagcacagaggtcgcctcgcaaggggcgccgttcatcaatggagatagagaaatggcattttcagtcaattatgacagcagtttcggcagctacagcatccataactatctgaacgagtgggcgtcgtcgtttggcgatatcaaccacaccaacggtaatgtcaccgactccaacagcggcggtttctacggcggcagcctgtccggcagccaatatgccgtgaccagcaccgccaacaacatcacctcgttcgtggcgggcggcaacctgacctacaccctgttcaacgcaccggcgcacaccctgtacggtcaactggattccctgtcgttcggcgacggcctgaacggcggcggctctacaccgtacaacatccaggttcctgacgtcagcttcggcggcctgaatctcagcagcctgcaggcgcagggccacgatggcgtggtacaccaggtggtgtacggcctgatgtccggcgataccggtgcgctggaaaccgcgctgaacggcatcctcgacgactacggtctgagcgtcaactccaccttcgatcaggtggcggcggcgacggcggtgggcgtgcagcacgccgacagcccggaattgctggcggcctgatcgcggccgtttgcccgccggcgccgcgtgccccggcgggcgttttctcgtttttagccgatggaaaacgccatgaaaaacgccgtcaggcgcggagaagtgatgagcgtgctggccgcataccggcgcggattttggggcattgcgctgtttaccgcagtgatcaacctgctgatgctggccccggcgctgtatatgctgcaggtctacgatcgcgtgttgccgtcgggcaaccgcatgacgctggcgatgctgaccctgatggtggtcggcctttacctgtttatgggcctgctggagtgggtgcgcagccaggtggtgatccgccttggcgcccagatggatatgcgcctcaatcagcgagtctacgacgccgccttcgaaaccaatttgaaaaccggcaacccgctggcggggcaggcattgaacgatctgaccaacctgcgccagttcgccaccggcaatgcgctgttcgcctttttcgatgcgccctggttcccggtttatctgctggtggttttcctgctccacccctggcttggcgcgttggccagcgctggggtgatcgtgctggtgctgctggcctggctcaaccagcgggtgtcgcaggcgccgctggcggaggccggccgcgtcgcgctgagcgccacgcagcaggccaacggcaacctgcgcaatgccgaagccatcgccgccatgggtatgttgaccgacttgcgcctgcgctggctgcggcagcatcagcagttcctgctgctgcagaaccgcgccagcgagaaaatcgccgcggtcaccgcctggtcgaaaaccgtgcggctggcgctgcagtcgctgatgttgggctgcggcgcgctgctggcggtcaacggcgacattacgccgggcatgatgatcgccggatcgatcctgatcggcagggtgctggggccgatcgatcagctgatcggcgcctggaagcagtggtcatcggcgcgccagtccctgcagcggctggaggtgatgctggccgctaacccgccacgaataccgagtctgccgctgccggcgcccggcggtaaattggccgtgaatcagttgaccgccagtgcgccaggcggcacggcgcctgtgttgcacggcgtcagttttcgcctggaggccggcgaggtgctgggcgtgattggcgcgtccggctccggcaaaaccctgctgatgcgccaactggttggcgcgctgacgccgctcagcggcgacgtgcggctggacggtgcagacattcagcagtgggacaagcaacaactcgggccgcatatcggctacttgccgcaggatatccagctgttcgccggcaccctgacggataacatcgcccgctttgggcaggtcgacgccgagaaggtggtggccgcggcggcgctggccggcgtgcatcagctgatcctgcatttaccgaaaggctatgagaccgagctgggtgaaggcggcagcggcctgtccggcggccaacgtcagcgggtggcgctggcgcgcgcgctgtatggatctccggcgctggtggtgctggacgaaccgaacgccaacctcgatcgcgaaggggaaggggcgctgcagcgggcgatcgaagcgctgaaggcgcgcggcaccaccatcgtgttggtgacccataaaccggcgatcctggcgaccaccgacaaattgctggtgctgagcgccggccagatacagcacttcggccccagcgacgccatcctgaaaaaactgcctggttttgcgcccgccgccgcaccggccaatgccgggcgcagcaacggcggcttcaacgtcaattacgccaacttcgccaaaacggccagcggtgaacgaaaagtatgagcaatcagagtgtgatccccggcgatatcgacgccctttcccggcagttcgacgaaggccgttatctgcggctgggaggctggctggtgctgttggggtttggcggtttcctgctgtgggggctgttggcgccgctggacaaaggcgtgccggtttccggcagcgtggtggtggccggcaaccgcaaggcggtgcagcacccgagcggcggcgtggtgtcgcagattcaggtgcatgagggcgaccgggtcagcgccgggcaggtgctgttgttgatggataccgtcgacagccgcacccagcgcgatgcgctgcgcagccagcagttgagcaacgccgcgcagcaggcgcggctgcaagccgagcgcgacggtctgcaagcgatcgctttcccgccatcgctgcaagcgcggcgagaagagccggaggtgatgtcactgatgctgctgcagcaacagctgctcaccagccgccgtgcggcgctgcagagcgagctggcggcgatcgcggaaagcatcgccggatcgcaggcgatgttggaaggggttcggcagtcttacgccagcaagcaacggcaaaaggccatgctgcaggagcaactgggcggcatgcgcaagctggcggcgcaagggtatgtggcgcgcaatcggctgctggatctggaggggcagcatgcgcagatcgacggccaggcatccgaggacagcggcaatatcggccgtctggggcgccagatcctggagctgaaactgcgggcgatccagcggcgggaggagtatcaaaaagaggtcagcagccagctggccgaggtgcggatgaagctggacgagctggataaccgcctggccaaggcggaggccgatctggggcatacgcaggtgaaagcgccggtggcgggcaccgtggtggggttgagcgtgttcaccgaaggcggcgtgatcggcgccggtcagcaactgatggagatcgtgcccagcgatcgcgggctgcaggtggaggcgcgtattccggtcgaactgatcgacaaggtgcaggtgggactgccggtcgaactgttgttctcggcgttcaaccaaagcaccacgccgcgcgtcgagggtgaagtgacgctggtcggggccgatcgcctgaccgacgagaaaagcggcgcgccttattacagcgtgcgcgccaaggtcagcgaagaaggattgcaacgcttgagcgggttggagatccgcccggggatgccggtcgaaggcttcatccgcaccggtgagcgttcgatgatgaactatctgttcaaaccgctgaccgatcgcctccatttggcgctgacggaagagtgagcatgtcggtttcgccgctgcctttcgccgcgcccggcaccgccatgccctggcgccgttgtctggtgttggtgctggcgctgcatctgctggttgccgcgctgttttggtcctggagatacaaggccgagccgccgtgggtgccgccgccggcggtgatggtgctgatggccgccgcgccgcaggccccggccgaggcgaaacaaccgccgggacaaaggacgccgccgcctcaggttgaaccgccggcgccgccggagccgttgccgctagtgaaagcgcctgacgccgcgcagccgaacatcgccgtgccgctgaaacagaaaaaaccacctaagccggtgaagaaaaacaacctgccccgcacgccgccgcacgagagaatcatcgcgccgccgaaggttcaggaacaaagcgtcggcgcgccgccgccgggccgcgcggataaaacggccgcgccgcaaacccgcctgacgccctatgctcaggcgggggaggacaactggcgcagccgcatcagcggccgcctgaatcgctttaagcgttaccccaaagacgcactgcggctgaagcgccagggcgtcgggcaggtgcgtttcacgttggacagacagggccacgtgctggcggtgacgctggtcagcagcgccgggctaccgtcgctggatcgtgaaatccaggcgctggtcaaacgcgcttcgccgctgcccacgccgccgtcggacgcctacgtcaacgacacggtggaattgacgctgccgatcgatttcagtttgcgcggcgcgggtttttgagtcgcgacgagatatcccccgaacaaaaccatttttcagcagcttgtcctgctattcattattttcaaagcgtatcgttattttaatcaacgtgacgaagttggcgttctgcgcgatattttaatttaaaaagcacgaatgccttttatttttctgctgataaaaaataaacagcttgacgctgtggagttcgggttttagtttttaattataaaacaggaactgagttccatatagtggaacaaggcggatcatgacaacgctggaaaatgccgctgcggtattaaaactcttttctcaacaacgcgtgatgcatggccagccgggtatagcattcagcgacgtggtggatcaattggcgctgccgaaaagcacggtgtcgcgcctgctgcagaccatggaaaatcagggcatgctggagcgcgatcccgatagccggcgttaccgcatcggcgcgctgttgctggcggtatccagccactatctgtcgatgccgctggtggacagcctggcggccagtatggcgcagctgtgccgccagacggcgtgtaccggctacctttcggtattggaggggcaggagatcatggtgatgcgcatgtttcccggccgccactttttgcaggtggtcactccggcgggttaccgttcaccggcggcggaaacctcggtcggccgggcgatactggcgcgtgaaagcgacgagcaggttcgagcgcgttatgccggcggttaccgagcggcttcgcccaatgcgccgcaaacgctggatgcgctgttgcagaagttgcagcaggtgaggcaccagggatggtcgttggcacgcaatgaaactttgaacagcatcagttcgctggcgaccgcgctggtgaacaagcacggcagcgagacggtggggctgtgtctgtccttcccttcgcagggtgaggaacagccgttcgtaccggaagttctggccgaattaaccgcagtcacctgccaactggcggaaaaatatggcgatgattattggcagcagatcaaataacgcgtcagagctgtagcattccatcataattaacgagtgccgacaccagggaactcattagttatattccaccgtattttattggtgggagtagataggctgagtaagagaataataatgttatgacgccagcagttccaaataatggaactgctgcggcgagctatcgcctggcgttatttccgtcatgcggcagggaatattcagggaaaccaagcatgaaatcaaataatccgctaaaagcggccggcacgctgttggtcatggcgctactttcggtgatgggggcgatcatcggcgttcaactgatcaccacgctgggcgtgacgcccaacacttcgatcatcggcgcgctgatcgccatgctgttggcgcgcatcccgctacagatgttccaacgctatcgttcggtgcatacccagaacctggcgcaaacggtgatctcctccgccactttcggtgcagccaactgtctgctgatgccgattgcggtgccttacgtgatggggcaaccgcagcttattttaccgatgttctgcggcgtggcggcggcgatgctgctcgacgcctatctgctttatcgtctgttcgataccaaagtgttccccgccgccaatgcctggccgccgggcgtcgccgccgcagaggcgattaaagccggcgatcgcggcggcaagcaggcctggctcctggtggtgggcgtagtggtgggcatcgctggatcaatgctcaagatccccatggcggctttcggcaccgcctttatcggcaatatctgggcgctgagcatgttcggcgtcgggctattgctgcgggcctacgccgagccggtggccggattcgatattaacgcccattttattccgcacggcgtgatggttggcgctggcctggtggcgctgatccaggtcgcgcaggtgatccgcagccgccgcgctgatagcgccggttatacccaacccgacagcgccgtaagcaaagcgctcggtctgggcgcggtcggctatatcgtcatcgccgcttttttggccctgatcggcgggctgtttagcgagatgtcgctgccgatgttggcgctgttcgtgatttacgcggcgtttgccgctttcgttcatgagttgatcgtcggtatcgctgccatgcactccggctggtttcccgcgttcgcggtggcgttgatcaccctgatagtcggtatcctgatcggtttcccaccgctggcgctatgcatcctgaccggttttaccgccgccaccgggccggccttcgccgacatgggcttcgatttgaaagccggcttcatcctgcgcggctacggtgaggatctgcagcaagagctgctggggcgtcgcattcagctgtttgcggcgttgatcgctttcatcatcgccattccggtggtttacctctcttaccacagctatttcctgcaggatctgatcccgccggtcgcgcgcgtttacgccaaaaccatcgaggccggcgcgcagccgggcatcgcctggagtctgttgatctgggcgatccccggcgccgtggtgcagctggtcggcggccctaaacgccagctcggcgtgctgctggcaaccggcctgctgatcaacaacgccttggccgggtgggcggtgctggtcggcatcgcgctgcgcgtggcgatcctgcgacgttggggggatcgtggccgcacgccgatggagattatggcggccggatttatcgccggcgatgcgctctacaacttcttcagctcgattttttccagcaagggcaaatagctcctgccgatgacattggtgaggtaaaacgaccatgagtttgcaacaaacgctgcaggtttttgaattgattgatagcgcattcgtcagcggccaagacgtcgtcgacctgtttgcgtcttacccggcgatccgggccagcaccttgcgcgccgaggggccgaagggcggcaccgatttcgtgcgtatcgagatccccggcagtgcaggaaaattcggcggtggtgcggcgccgacgctgggcattatcggccgcctgggcggcattggcgcgcggccgacgcgaatcgggctggtgtccgacggcgacggcgcgatcgccgccattgccgccgcgctgaagttggcggagatgcagcgcaagggcgacatgctgccgggcgatgtgatcgtcaccacccatatttgcccgaacgcgccgacccggccgcacgatccggttgattttatggattcaccgatcgatgacgtgacgatgaacgataacgaagtggtgccggaggctgacgccatcctgtcgatcgacaccaccaaaggcaaccgcatcatcaatcataaaggctatgcgctgtcgccgacggtgaaagaggggtacatcctgcgggtggcggaagatctgctgcgcatcatggagatgaccagcggccggccggcggtgactttcccgatcaccacgcaggacatcaccccttacggcaacggtgtacatcacctcaacagcatcttgcagccctcgaccgctactgcagcgccggtggtcggcgtggcgatctgcagcgaatcagtggtgccgggctgcggtaccggagccagccacgaaacggacatcgcgttggcggtcaaattcgcggtggaagtcgccaaagaattcggccgcggtacctgccggttctatgatgccgccgaatacgaccggctgctggcgctgtacggcagtctgagccacctgcaaaaaaggagatagacccatgacggcttcattcgccacgctgaccatcggtcaggcgccgcgcagcgatatcatgccgctgctgtctgcttatctgccggcggagcgagtgaggcacgtcggtttgctggacggcctggatatcgggcagatcgccgagcgttatgcaccgcaacagggcgacaagctgctggtgtcgcgtcttttggacggtacgcaggtgacgctcggcgccgctcgcgtcgaaagcgggttgcaggagaagatccgcgaactggaagcgacgggatgcgaggtgattctgttgctatgcaccggcgaattcggtcgattgcaggcggaacgggtgctgttgctggaaccggatcgcattatcccgccgttgatctctgcgatcgtcggcacacaccgtgtcggcatcgtggtgccggtggctgaacaggttgggcagcaggcgcgcaaatggcggcagctggcggcgccgccgagctatgccgtcgccagcccctatctggcggatgacgctgcgctggagcaggcggcttgcaccctgctgcggcagggggcggaggtggtggtgctcgattgtatcggttatcaccagcgtcaccgcgcttttctgcaggcgcgtctgtcggtaccggtgctgctgtcgaacgtactggtcgccaagctggccgcagagttaatcgactgattcaaatagccataaatctgcgctcgacgcgactacgggcgttttgcgcccgtgaggcgccccgggcttcagcagccctgactgtcggcgagagggcctgtagcgttttactctgcgccgcgatcgcatttcgcgcgaaaaaccagtgacagatcaaccgcaatcccccaatatggattttccatcaagatgattacgcgggtgccagtctatgctgaaagtgaatgagtattttgccggaaaagtgaagtctatcggttttgacagtagcagcatcggtcttaccagcgtgggtgtgatggaagagggcgaatacaccttctccaccgcgcagccggaagaaatgacggtgatcaccggggcgctgaaagtgctgctgccgggagcgccggactggcaagtgtttacgccgggcgagaagttcttcgtgccggggcacagcgagttcaacctgcaggtggccgacgccaccgcctatctgtgccgctacctgagcaaataaacgttgctcgttaggggaacgcagggctcagcgaaggctgggccctggtcgtttctgcggcgggattaacgctgggcttcgccgccgagcgcttcgatggtgtttttgatcaacgccgccagctcgctggtcatcaggataaagtcggcgtcaaagcgctgggcgaagtcgtcgcgatcgatgtcgtcgttctgttcgcgcagcgtgtcggcgaacttcaggcgcttgaacgaaccgtcgtccgacagcatcagctggatgcgctcctgccaatccaccgccagcttggtcaccagcttgccggcttcgatgtgcaccgcgatttcgtcgctgatcagattctgtttcttgcagcggatcacgccgccttcttccagaatcgctttcaattccgcttcatcctgaatggcgaagccggccggcatctcgccggaacgcacccattcggtcagcgtcagttcgatcgggctttccatggtcagcggcaccaccggcagcgagccgaggcttttacgcagcagcgccagcgtgtcttcggcgcgtttagcgctggcggcgtcgaccatgatcagatcgttgacggtgtctatccacatgaaggtctggttgaagcggctgaacgcgcgcggcagcaggctgtgcagcacttcatccttcagcgcgtctttctcggttttcttcagtttgcggtgttgctccgcctccaggcgctcaatcttggcctgcagctcttgcttgatcaccggcgacggcaggattttctcttccttgcgcgcgcagatgacgatctggccgttgaccgcgtgcgtcagcgcatcgctgtgcgagcccatcggggaaacccagccggtcttcgccatgtcctggctgccgcacggcgtgaaggcgaacgcgctgagttgtttttccatttcatccgcgtttaacgccacttcgcggctcaaacggtaaaccatcaaattcttaaaccacagcataatgttatccctggctgggcgtgcgttcggcacgctgattcgtcaaaagcagggcggcatgataacgaattgacgctgaaaaatcgccccattctctccgaattgcgtcgctttgcgcatcgggaaaggacgggacggagaatgggaaacaggtgattcattcgcgcgcttacattaggctgtgacaacgctgcgcggcatcgaggagaaaaaatacgtgcgcattggcatcgacttgggtggaacgaaaattgaagtgatcgcgttggcgaatgacgggcgggagctgtttcgccatcgcatcgccacgccgcgccatgactaccggcaaaccctggcggcgatcgccgggctggtgaaactggcggaggatcataccggcgaacgaggatcggtcgggatcggcattcccggcacgctgtcgccgtttaccgggcgagtaaagaacgccaactcggtgtggctcaacggccagcctctggataaggatctgtcggcgctgctggcgcgcgaggtgcgcatcgccaacgacgccaactgcctggcggtgtcggaagccaccgatggcgccggcgccggcgcgaaaaccgtgtttgcggtcatcatcggcaccggctgcggcgccggcgtggcgctgaacggccaggcgcatgccggcggcaacggcatcgccggcgaatggggccacaatccgctgccgtggcaggatgacgatgagctgcgctacgcccgcgaagtgccgtgctactgcggcaagccgggttgcatcgaaacctttgtttccggcaccggtttcgccaccgactatgcgcgcctgagcggcaatgcgctgcaagggcatgagatcatggcgttgagcgagcggggcgatgcgttggcggagcaggcgattgaccgctacgaaatgcgattggcgaaatcgctggcgcacgtgatcaacatgctggatccggacgtggtagtgctcggcggcggcatgagcaacgtggatcgtctgtatcgcacggtgccgcaactggtgaaaggctgggtgttcggcggcgagtgtgaaacgccgatccgcaaggccgttcacggtgactccagcggcgtgcgcggtgcggcctggctgtggccgcaacagcagcgctaagcgttgcaacaaagcgcgaggctgctcgcgctttaaacccttcactgtacaaaaactggacggcgctttatgatttagctaacttagctaaggaggacgcgtatgccgattcaggccaatatgcacgaagccaaatccaatctgagccaactggcggacagagccgcggagggagaaaccgtgattattgcaaaagcagggaagccgtacgtacagctggtcgccatcaagggggaagcgcgccgccctggcgccgccaagggcaggttcaccgtgccggcggatttcaacgccggggatgcggccattgcggcgctgtttgagggcgatgaatgaagcgcctgctgctggatacccacgcgttgctgtggtggctgatcgatgacgcctgcctgggcgccaacgccaaaaggcagatcgccgatccgggcaatgcggtgtacgtcagcgcggccagcatttgggagatctcgatcaagcaggcgctgggcaagctggcgctgccggaagacatctttgcgatcatcgaggccgaagattttctgtcgctgccgatggacgcctttcattgccaacaggccgggcagctgccgccacaccatcaggatcctttcgatcgcatgctgatcgcgcaggcgcaggccgaagggctgacgctgatttccgccgacgcggtgtttccgcagtacggcgtgcgggtggcggacgcccgccgttaaaccggcttttcctcgctttcgctgcgcacccgttcgatatgaatggtcaggaacatcatctcttccgtggtgagctggtgctgatagtgcttttcgatgtggcggttgatcttacctgcgcaggcgaatgactcgcggtacttctctttcaccacctgatacagcgagtcgtcgtcgctgtcgacgtagtttttccccagcagccgttgggcgaagaatttcaagtgggtgacgaaccggtggtagctcagggattcctcgttgtaatcaaagcggaaatggtatttgaccaggttgaggatctcttgcatcacgcgggtaatgtgcagcgtgttgtgcatctcgtcgttaagctgggcgttgaccaggtgcagggcgataaatccggcttcgtcctccggcaacgcggtatccagccgctgtgcgatcagggccagcgcctccagcccgacggcgaattcggccgggtagagttttttaatctcccatagcaacgcatttttgatatccagcccttgcgcatggcgctgcagggcaaagtggatgtgatcggtcagcgtgatgtagacgatgttatgcagcttgcccggcaggcgttcgcgggcgagagtaataatcctgtcggcagtggtgacgcaggccaatgggatctcggcgagcagctctttatagcgctcggcgatttcaccgccgttatgggtgaacaccttttcgatcaggctttcgtccagcgtatcgccgggcttctttttaaagccgattccttttcccatcaccaccgtctctgcctgacggtcgtccagcgtaatcaccacgttattattgagtatcttagcgattttcatggtttttcccggtgtttcagcatcctgaaaacgaaaaaacctgacgcccggaagcgatcccgggcgtcaggttttgcctgtattttatgtttctgtcctgcggcctgagcggcggaggggatacagtaacaatcctgttatgctggcataataacccgtgcccgccgcggctcaacgcttttcaccgcggagtgccgccgcggtcacacttctgcgccgcaagccgcgggatcattccagcctgaagtgcgcctccagccggctgacgccgagcccgttgacctttttcactttgatctgcaccggaatgcgttctttcatcgcctcgacgtggctgatcacgccgatggttttgccggaggcgttcaggctgtccagcgcatccagcgcggtatcgagggtttcggcgtccagcgtgccgaagccttcgtcgaggaacagcgagtcgatgctggttttatggctgaccagatcggacaacgccagcgccaacgccaggctgaccaggaagctctcgccgccggacagggtgcgggtatcgcgcagcgcgtccgcctgccaggtgtccaccacctgcagctccagcgcgtcgctggtcttgcgctgcagcaggtagcgcccgtgcagccggccgagctgaaggttggccaggtaaaccagatgatcgagcgtcagcccctgagcgaagcggcggaacttgtcgccttctttcgagccgatcagttggttgaggtagctccagtcatcgtagtcttgctggctgcgggcgatctgctcgaacagcgcctgctgattgagacggcgttcggcgtcgcttgccagctgattgcgcagttcgccctgacgcagctgcaacgttttcaactgctgcgccagctcggccagcgattgggtgagcgcatcgagatccgcgttggcttcatccagcccttcagggcggttctgccggtgctgctccagcgtttgcgtcgcctgtgtcagcagggcggtggcctctacctgccgctgttgcaactgctctttgcgctgctgcaattcgcggcgcaggacatcgtccagcagcgcggcggcgaaggcggtttcatcggcgaattcgctgtcggccagcgcctgctgccactgctgctgcgcctgctgcagccgctcctgcatctgggtgtgttgttgttgcagcccggactgctggccggccaggcgctcgcgcagttcctgcgccttttgccactgctcggcggcctgcaaactggcctgttcacaggcggtttgtttggcgcgcagctgttcgcgcacctcggcgacctgctgttcgccgaacagcgtcagccgctgcgcgcgtcgttcggcaagggtcttctcgccttcttgccagcgttgttgcagctcttgctgctgttgcaggctgtcggcgtgggctttctgcagcagcgtaaagcgttcttcgagcaacgccagctgttgctgcgtctgctgctgctgcgtttgcagatcgatgagcgcatccttcgcctgctgtaccgcctgcgccgcctgttcatgctgctgcagcgcctgttgcccgcgccgttcttcgtcgtcgcagccgttcagccaggcgctgagttgctcgccatccgccagcgtaaagtcgaacgccagcggcgcgctgagctgccgccactgctgctgttggccggccagctgttgttcatcctgcgcgatggtttgctgctgacgctgcaattgctgttgcaggttgtcgtaacgggctcgcagctcgacgccttgtttttgcaatgcttcggtctggactttcatttgctccagacgttgcgcggtttctgacagttttacctcttggtattgttctaccgccgggtgctcgcatgagccgcacagcgggcagggggcgccgggttgcaaacgggcgcgctcggcctccagacccacgatccgttgttccagcgcataggttttttcaacatcggcctggtgggctttctgctgcttaaatcgctgacggatgagttctagctgtggttccaactgggtaagttcatgttgaccgctgtttagctcttgccgctgttgttccagccgtttaacgatttgctgcgataaagaagcgagagtaaacagctgctggcgcgtcgggcgcagatccgccaggacgctcaggcgctggcgcagcggggccagcggcgtttgcgcctccagcgcctgctgctgttgctgttgaacgaccagcgcttcggtcagcgtgttcaactgctgctgaaactgtgcggcctgcctcgtcagttggctgcgctgagcggtgagctgctccagcgcggtctgctgctgggcgcactgctgtgcggcggcatcgccggcctgtctacgttcggcctgtgtcgactgcagttgggctatttgatggtcgagcggggcgacctgctcgtcgatcagttgttgctgttgccgcatgtgttcggcatgcgcttgctgcgcctggcgggttttctccaccgcctgctgcagcggggtcaactgcgccgactgctgttcctgctgttgcgtcagctgggctgcctgctgttgtatcgtctgcagctcggcgcggcagcgatcgcgttcaccgcgcagcggccgcaatttctcggccggctcgctgagcgccagccgctgcagctgcggggcggcctcctcctgctcgcgctgggcggtgtccagccgcaattgcccctcgctttgctgttgccggaggcgttgccattgctgcagccagctcagcgcctgttgctggcgctggatttgttcgccgagagcgatttcctgcgcgctcagcgccgccagctgttcggtcagagactggcgctgctcgtcgttcagcagttcgatgccgctggcgcgttggtgcaacgcatccaggtcggttttggcctgcttgtgcgactcgaacacctgttcggacaaccgcccgtagatttcggtgccggtcagctcttccagcagctcggcgcgatcgttggcgtcggcgttgaggaaggcggcgaactgcccctgagacagcatcatcgatttggtgaagcggccaaagtccagcccggtgatggcggcggtaagctccagcttgtcgcgcaccttgtccgccaggatcttgccgtcttcgcggcgtgccagttcgaccttcggcgcctgcagattgccgtccggcgcgtttttggcgcggcgctggctccagaaggcgcgatagccgatgcccttgacctcgaactcgacctccgccagcgattcggcggtgtggcgggtcatcagttcattctggcttggcgtgacgttgagacgcggcgtctggtggtacagcgccaggcaaatggcgtccagcagggtggttttgcccgcgccggtcgggccggtaatggcgaacagaccgttgctggcgaacggctcggcggtgaagtcaattttccattcgccctgcagcgagttgaggttttttaaccgcaggctgaggattttcatgggttgctctcttcagggttgtgctgcaccgcctcgaccacctggcggaacagttggtgcatccgccgttggcgcgcttcgggcatgtcggcctcctgcgccaggcgccgttcgaacacctcgttgacgctcagctcgttgagcgtttccttatcctgctgcgcgatcgcctggcggcgctgctctttactgcgccgcagcagcaccacttccaccggcagcgcatccgccatcagctggatgcggcgttggatatcgctgaggtagtcctgcgtcgccacttcgatatccagccacaccggcagctcgccggcataatcggcaaattgccgcagctgccgttcgatctcggccagatcgcctttgagcagttgcatgggctgaaactgcgggatcgttaacgtttctacccgctgcaaagcgccgtcggcgaaatccaccaggaagacgcttttggctttgcccagctcatcgaagctcagcgggatcggcgagccgctatagcgaatatgctccgatttggcgacgttctgcgcgcggtgaatgtggcccagcgcgatatagtcggcgggggggaaggcctgcgccgggaaggcgtcgagggtgccgatatagatgtcgcgcaccgagtcggaggtggtaacgccgacggtggtcaggtggccggtggcgacgatcggcagtggcaggcccaactggtcgcggcgctcgcaggccgcctgatacagcgtttggtaatgttcggcgatggcttcctgcaacgcctgctgtttctgcgcgccggattcgccggcgcggctggtgagcagatcgcgcggccgcaggaacggaatggcgcacagcaccgcgcccggctggccgtcgcgccggttcagcaccacgatttgctgttccggggcgccctgcgcgctggcgatcaccgtggtgttcaggcaggagagcagctcacgcgattcgttcagcgtcgccaccgagtcgtggttgccgcccagcaccaccaactggcagccggtgcgctgcagttccaccacgaagcggttgtacagctcgcgggcatagctgggcggcgagccggtatcgaacaaatctccggcgacgatcagcgcatccacctgctgctgatctacctgttcgatcagccagttcagaaaagcctggtgctcggcggcgcggcttttggtgaaaaagtactggccaaggtgccagtcagaggtgtggatcaggcgcatgacactcccggatgtaaagataatggcgatgattataaaggccgcggcggcggctgtcccggcgcaatgatgatgacaaccggatgatttttcgttactgcgggaaataatcgctatgcttactgcctataacagccggtttttttcataaaagtgtcacaaaactgacgcataatggcgcccgaaaagtcgctaacacattggcaggattgacgatggcaagacgcatactggtggtggaagacgaagcgccgatccgtgagatggtgtgctttgtgttggaacagaatggttaccaaccgttggaagccgaagattatgacagcgccgtgacgcgtctgtctgagccgttccctgatttggtgttgcttgactggatgttgcccggtggttccggcattcagtttatcaaacatatgaagcgcgaagcgctgacccgcgatatcccggtgatgatgctgaccgcgcgcggcgaagaagaagaccgggtgcgcggcctggaagtgggggcggatgattacatcaccaagccgttctcgcccaaggagctggtggcgcgcatcaaagcggtcatgcgccgcatttcgccgatggcggtggaagaagtgattgaaatgcaagggttgagcctggatccgtcctcccaccgcgtaatggcgaacgatcaggcgctggacatggggccgaccgagttcaagctactgcacttctttatgacccacccggagcgggtttatagccgcgagcagttgcttaatcacgtctggggcactaacgtttatgtggaagaccgtaccgttgacgtgcatatccgtcggctccgcaaggcgttagaaaccagtgggcatgataaaatggttcaaaccgttcggggcaccggctaccggttctcaacgcgctactgatcgcgccgcgctggagaatatgccgtgttagaacgtctgtcgtggaagaggctggctttggagctggctcttttctgtctgcccgccttactgctggggctgattttcggttatctgccctggttcctgctggcctctgcgctggctgcgctggtgtggaatttctacaaccagctcaaactctcccattggctgtggatcgaccgcagcatgacgccgccgcccggccgctggagctgggagccgctgttctatggcctgtatcagatgcagcagcgcaaccgccgccgccggcgcgagctggcgctgctgatcaagcgctttcgcagcggggccgaatcgctgcctgacgcggtggtgatgaccaccgtcgaaggcaatatcttctggtgcaacgggctggcgcagcatctgctcggctttcgctggccggaagacaacggccagcacatccttaacctgctgcgttatccggaattcagccactatctgcaacagcaggagttttcgcgcccgctgacgctgcagctgaacaacgaacactacgtcgaattccgcgtgatgccctattccgaagggcaattgctgatggtggcgcgcgacgtcacccagatgcgtcagttggagggcgcgcggcgcaacttcttcgccaacgtcagccatgagctgcgtacgccgctgacggtgctgcagggctatctggagatgatgggcgacgaagagcaggacggttcgctgcgcagcaaggcgctgagcaccatgcaagagcagacccgccggatggacgggctggtcaagcagttgctgacgctgtcgcgcatcgaggcggcgcccaatgtcgacatgaacgagcgggtggatattccgctgatgctgcgggtgttgcagcgtgaggcgcaatcgctgagcggcggcaatcacgagatcaccttccgggtgaacgaacagctcaacgtgttcggcaatgaagaccagttgcgcagcgcggtgtctaacctggtgtacaatgcggtcaaccacacgccgaagggcacccatatcgaagtcagctggcagcagacggcgcatggcgcgcagttccaggtcagcgacaacgggcctggcatcgccgccgagcacctgccgcgcctgaccgagcgtttctaccgcgtcgacaaggcccgctcgcgccagaccggcggcagcgggctggggctggcgatcgtcaagcacgcgctcagccatcacgacgcgcggctggagatcctcagcgaaccggggatcggcacccgctttatctttaccttgcccaatcggttgattgttcccgccgctttatcagagaatgcggtgaaaaattaacgcgagacaccggtatgacccgaatcacccgagggctgttgctttgcctggcgctgctggccggacgcggcgcgctggcgcagcctgacggcatgttggcgggcaacctgtccagcgtcggctccgacacgctggcgaatctgatggcgctgtgggcgcaggatttcagccagcattatcccaacgtcaacctgcagatccaggccgccggttcgtcgaccgcgccgaccgcgttggcggcgggcgccgcgcagctgggcccgatgagccggccgatgaaggcggccgaggtttcggcgttcgaacaccgttacggctatgcgccgctggcggtgccggtagcggtggatgcgctggtggtgttggtgcatcaggacaatccgctgcgcggcctcaacctgcagcagctcgaccgcattttctccgccacccggcgctgcggcgaaagccagccgctgacgcgctggggcgagctggggctgcgcggcgactgggcgacgcgctcgctgcaacgcttcggccgcaactcggcgtccggcacctacggctatttcaaactgcgcgcgctgtgcggcggcgatttcatgccgcgcgtcaatgagctgcccggttcggcctcggtagtgcaggcggtggccggttcgctcaacggcatcggctacgccagcatcggttttcgcgccagcggcgtgcggctgctgccgctggcggagtcgggagaagactatgtcgcgcctaccgccgccaacgtgcgcaacgatcgctacccgctgtcgcgctatctgtatatctacatcaataaagccccccatcaaccgctggagccgctgaccgccgcgtttctcgatcgcgtgctgtcgacaccagggcaaagcctggtcaatcacgacggctatctgccactgccgccggccgcgctgcagaagacccgccaggcgctcgggttgccaccgctcgcgccggccacggtgcaataagcgacaaaaagcggcgtaattttcgccttttttcacggcgaaacggagcttataccacgcgaaaatcgagcatttattggcgttttcgcgcggtaaagtgatatatgcttcacgtttcgtgaattcattgttcaaaaatgatacaaatcatgtagtgtatatttattgatagccaatatgatcgactggtggctaaagtttatatggtcgatagctctgcttttcgccgtgcgtcttgccttgaagcgctataaacgtttaccttagccttcgttgtcggattaaacctccatttttataactcctaaaattttgcccatcttcatgagcggccactttcgaatagggacataaacgccggatcgactgcgtttagggtgcttatttggcgcggcgacgatcgggcatgccggcaaccgggtggggcgtttcgccaccacgctatcggacaatttttttcatttgaacaggcaacacgacatcgtatgagtcatcgtttaacgtcaaaagatatcctggcactgggctttatgacctttgccttattcgttggggccgggaacatcatcttcccgccgatggtcggcttgcagtccggtgaacatgtctggactgcggcgctgggcttcctgatcaccgccgtgggcctgccggtcatcaccgtcatcgcgctggcgcgcgtcggcggcggcatcgacgccctcagttcgccgatcggccgcggcgccggcctgctgctggcgaccgtctgctacctggccgtcggcccgctgttcgccacgccgcgtaccgccaccgtgtcctttgaggtgggcatcgccccgctgaccggcgacggcgccatgccgctgttcatctacagcctggtgtatttcgcgctggtgatcggcatctctctgtatccgggccgcctgctcgataccgttggccatgtgttggcgccgctgaagatcgtcgcgctggccgtactgggcatcgccgcactgctgtggcctgccggcgcgccgattccggcgacgacggcttatcagagcgtgcctttctcctccggcttcgttaacggctatctgaccatggatacgctgggcgcgctggtgttcggcatcgttatcgtcaacgcggcgcgctcgcgcggcgtgaaagacgccggcctgttgacccgttacaccattctggccggtttgatcgccggcgtgggcctgacgctggtgtacctgagcttgttcaagctgggttccggcagcggcgcgctggtgcctgacgccaccaacggcgcggtgatcctacacgcttacgttcagaacaccttcggcggcctgggcagcttcttcctggcggcgctgatcttcatcgcctgcatggtgaccgcggtaggcctgacctgcgcctgcgccgagttcttcgcgcaatacctgccgttctcttacaagacgctggtgtttatcctgggactgttctcgatggtggtgtccaacctcggcctgagccacctgatccagatctccattccggtgctgaccgcgatttacccgccgtgcatcgtgctggtggtgctgagcttcaccctgcgttggtggcacagcgcgccgcgtatcatcgcgccggtgatgcttgtcagcctgttgtttggtatccttgacgcggtgaaagcgtccagcttccagcagctgctgccggcctggaccactcacctgccgctggcggagcaggggttggcatggttgccgccttcgctgctgatgctggtgctggtcgcgatttatgatcgggtgtgcacgcgttcccaagtgaccgcgcactgataatcccccggcttaatccagggccacggacatgtccgtggcttttttacgtttaaaactatgggtcatcttcatgcaacaacagtcacccaccaccgcctccgacaataagctgaaacgcggcctcagtacgcgccatattcgctttatggcgctgggatcggccatcggcaccgggttgttctacggctcggcggacgccatcaaaatggccggcccgagcgtgctgctggcttacctgatcggcggcatcgtggccttcatcatcatgcgcgcactgggagagatgtcggtcaataacccgcaggccagctcattttcccgctacgcgcaggactacctcggcccgatggcgggttacatcaccggctggacttactgctttgaaatcctgattgtcgccatcgccgacgtgaccgccttcggcatctatatgggcgtctggttcccggaagtgccgcactggatctgggtgctgagcgtggtgctgatcatcggcgccatcaacctgatgagcgtcaaggtgttcggcgagctggagttctggttctcgttcttcaaggtcgccaccatcatcatcatgatcgcggccggcatcggcatcatcatctggggtatcggcaacggcgggcaaccgaccggcattcataacctgtggtcgaacggcggcttcttcagcaacggcgttatcggcatgatcctgtcgctgcagctggtgatgttcgcttacggcggcattgaaatcatcggcatcaccgccggcgaagccaaagatccgaaaaaatcgattcccaaagccatcaactcggtgccgtggcgcattctggtgttctacgtcggtacgctgtttgtcatcatgtcgatctacccgtggaaccaggtgggcaccaacggcagcccgttcgtgctgaccttccagcatatgggcatcaccgtggcggcaggcatcctcaacttcgtggtgatcaccgcttcgctgtcggcgatcaacagcgacgtgttcggcgtcggtcgcatgctgcacggcatggccgaacaggggcacgcgccgaagatgttcagcaaggtgtcgaaacgcggcattccctgggtgacggtagtggtgatgatgctggcgctgttgctggcggtgtacctcaactacatcatgccagagagcgtgttcctggtgatcgcctccctggcgaccttcgccaccgtgtgggtgtggatcatgatcctgttctcccaaatcgccttccgccgcagcctgagcaaagagcaggtgaagcagctggcgttcccgctgcgcggcggggtgttcacctcggtggtggcgatcgtgttcctggtattcatcatcggcctgatcggctatttcccgaccacgcgcgtctcgctgtacgccggcctggtctgggtggtgttgctgctggcggggtactggttcaaggtcaaccgccagaaaaaacgcgcgctgctggcgacgcagcaagactaaatggaaaaacaccggctgaggccggtgtttttttagggtttatcttccacttcctcatccccggcggcgcgcgcttcgatgcgcataccgccgtcgttcaggcgttcctcctcttcctcgccggcgcagcgtgccagcacttcgcgaatgtcctgcagattgctgctaagggcgctcagcgaaggttgcagattgcggggcatgcggctttcatccagcgatgcgctgtgcaggcagccgataaacagcagcgtggccatcagggtgaacagccgatgacgtaaccgtttcagcaagagctttccctctcggtggtgaaggtgatggcgcattaacgccgttttcaccggggaaaagaaggggatggagatatctgctggcaattgaaagcgaataattaccagcagacacagttacgtcagccgacgtcaggaagcgttcgcgctttgtcgcagcatgccgcgcaggtcgttgccggtcggcgtctgatgcacgcgcaggccgaactcgtcgatcaccgccaggatatggtcgaaaatatccgcctgaatgctttcatactccgcccagaccgtggtgttggtgaaggcgtagatttccagcggcaggccctccggcgtcggcgccagctggcgcaccatcagcgtcatgttcaggtgaatacgcggatgagcgcgcaggtaggcttccagataggcgcgcagtgtgccgaggttggtgagacggcggccgttgagcggcgaggccagatcgacggcgatctcctggttgtgctggctcagctcctgggttttgttattcagatagctgtgcagcagcgggttgcgctgcaggcggcgctgttcctcttccgacaggaagtgcacgctgccggtgtcgatattcaggctgcgcttgatgcggcgcccgccggattccgacatcgaacgccagttcttgaatgagtcggagatcagcgcgtaggtggggatggtggtgacggtgttgtcccagttgcgcactttgaccgtggtcaggccgatgtcggtgaccgcgccgtcggcgccgtatttcggcatttccagccagtcgccgatcttgagcatatcgttggcggagagctgaatgccggccaccagcccgaggatcggatccttgaacaccaacatcaagaccgcggtcatggcgcccaggccgctgagcagcagcagcggcgatttgcccatcagcaatgagacgatcatgatgccgatcaggatcgccgccaccagtttcaggccctggaaaatgccgcgcagcggcagctgattggaaatcgggctttggcgcagcagcgccagcagcgtatccagcagcgagaacagcgacagcagggtgaaggcgaggatccacacctgcgcggcggtgacgatcaccgcttgggtctggctgccgctctgcagccacagcgtcgcctggatgctgatgatcaccccttgcagcagcagcgccacgcgctggaacagtttgtattgggtgatggcctgttgccagacgcgctgcgactgctggccacggcgctgaagagcagccaacaccacccggtgcagcaccaggtggatcgctaccgagatcagaacaatcaaccccaataccatcaacagcgacatcactccgccgaattccaaaccaaactgttccagccagcgcgttatctgttgttgcattaccgctccttaaaaaatgcgcaaaaaatatcctgtaaacttaaaacgcgttagcctaaggggtaacgtgcaggatttgtacctgtttacctttttttacatcaagttagcgttatttttcggtctccgccccccggctcatccccgggttttgcggccagagaggagggggagttgcacttaacgtggcattgttcgtttcttgaagaacgccgtcgatttcgtttggtacagcaggagaacagtatgcttaacgcctggcatcaaccggtcccgccttttgtggtgaaacaagggcaacgtttggatatcacgctgtggttacaaggggatgaactgcctgaacgggtatttttgcgcgccgaaccggacaatgaagagtggctgctggtgatgaaagcgcagcgccacgaggggatgcggcgctaccaggccagcctgacgctgaatgagggcgagccgacgcggcgatactgcttcaagctgctgtgggccgatcgccaacagtggttcggcccgcagggctggtcgtcaacgccgccgggccagctggcgcagttcgccgtcgacgatcctgacaatggccccgagtgggtggcggatcagctgttctaccagattttccccgatcgcttcgccagcagcggcggcgagcacggcatccagagcggcagctatcgccatcatgcggccggcgccgaggtaattcggcgcgactggcagcacccgttggaggatcgccacgccgcctcgaccttttacggcggcgatctggacggcatcagcggcaaactgccgtacctgcagcagctgggcgtgacggcgttgtacctgaacccgatttttaccgcgccgagcgtgcataagtacgataccgaggattattaccaggtcgatccgcacttcggcggcaacgcggcgctgcagcgtttgcgagtaagcactcacaaggtgggcatgaaactggtgctggacggggtattcaaccacaccggcgattcgcacccgtggtttgaccgccatcgtcagggcgaaaacggcgcctgtcaccaccccgattcgccgtatcgcggctggttcaacttctacccggacggccgcgcgctcgactggaagggcaacgccagcctgccgaagctcaacttcgccgagccgcaggtggcggaagcgatttatcagggcgaaggcagcgtggtgcgtcactggctgcgcccgccgtacagcatcgacggctggcggctggacgtggtgcatatgctgggggagaacggcggcgccaccggcaatctgcgccacctggcgggcatctatcaggcggtgaagcaggagaatccgcaggcctatgtcttgggcgagcacttcggcgacgcgcgccgctggctgcacgccggcgtggaggatgcggcgatgaactacatgggattcgcgctgccggtgcgggcgtttttagcggggctggacgtggcctaccacccggtgcggctggacgccgccgggtgcgcgcagtggatggacggctaccgcgccgggctgccgcacagccgccagctgatccagttcaatcagctggacagccacgataccgcgcgtttcctcacgctgttgcaggggaacgcggcgcgcatgcagatggcggcggtgtggctgctgagctggatcggtgtgccttgcctctattatggcgatgagattgggttggacggcggcaacgatccgttctgccgcaagccgttcccgtgggacgtcggcgactgggaccggccgctgctggcgctgttccagcgcatggcggcgctgcgtaaacagagcctggccttgcgccgcggcggctgtcaggtgctgtacgccagcggcgaaacgctggtgttcgtgcgtctgtatcagcaggagcaggtgttggtggcgctgcagcgcgacggcagcggccaggcgcagctgccgcataacccgctgttggcgcgtggcccgtggcggcgtgtggaagggcggggagagttgagcgaaacggcgggcgggttgcgcctgcagttggcggaagagtcggccaccgtatggcgctgcgagggctaaagggagtgcgggggcagaaacgcccccgcgattaaggtgagtgggtatttacatcagtaaccgaccgcggagcctgccggacggcgcacgtcgttggcgccgtacaggtagccttcacgcactttaccggaaactgccgaatcgttgccggagttggccgggctgacgcccgccgcgcccggtaaaccgaccagaatcagttcggcggcgccccacggcgtttgctcgaccatcttataacccatgccgctcagcagcttcagcgtatcggcggaaacgccgcgctgttcgtagtacacctcatccggcagccattggtgatggatgcgcggcgcgtccaccgcttcctgtggcgccatgccgtggtcgatcacgttcaacgcggtctgcagggtgatggtgatgatgcgcgaaccaccaggcgagcccagcaccataaagatcttgttgtccttggtcaccagcgtcgggctcattgacgatagtgggcgcttaccgggggcaatgctgttggcggtgccctgcaccagcccgtacaggtttttctcgcccactttgaccgtaaaatcgtccatctcgtcgttgaggaagaagccggtgcccggtgcgatcaccacggcgccgaagcggccgttgacggtataggtggtggagaccgcgttgccgtcgtgatcgacgatcgagtagtgggtggtttccggcttctcatgcggctccatgccgggctgcacgttttccgacggcgtggccttgtccgcgacgattttcttgcggatctgctcggcgtagctcttgctcaccagccggtcgatcgggttcttgatgaattccgggtcgccgaggtaggtgttgcggtccatgtaggcatggcgcatcgcctcggtcatggtatgaatggccgccgccgagttgaagcccatgcttttcaggtcatagccttccaccacgttgaggatttcgcacagcgtcacgccgccggagctgggaggcggcgccgacacgaacttgtagccgcgatagctgcaggtgatcggcggcgtttcggtgaccttgtagttggcgaagtcggccgccgtcaaaatgccgccgccctgtttggccgctgcctccacggcctgcgggatcttgcctttgtagaaggcgtcggttccccctttggcgatggcttccagcgtattggccagatcggtttgcaccagtttgtcccccggctgcagcgggctgccgtccgggcgcaggaagattttggccgactcgggatcctgtttgaaacgtgcaacggtggtgtcgagaatatcggtatcggcgcgggtcagcacaaagccttcgcgcgccagcttgatcgccggcgccagcacctgttcacggctcagtttgccgtacttctcacgcgcggtttccattcccagcacggtgcccggcacgcccgccgccagatagccgtacaggctggcatctttcttcaccttgccgtcggcatccagatacatgttggcgctggccgccgccggcgcggtttcgcggaagttgatgaaggtgtcggtgccgtccgccaggtggacggtcataaatccgccgccgccgatgttgccgcagcaggggttaaccaccgcctgcgcatagccgaccgccacggcggcgtcgatggcgttgccgcccattttcaggatatccacgccgacctgcgaggccagatgctgcgaggtgaccaccatgccgttttgggcttccaccgccgggttggatgccgcatacaggctgccgctgaccagcagcgccgccatggtcaggggtttgctccatttctgtaaaaacatagttattcctaccctgtcagttttttattgtgttgtgtttgcttgccgttgttcgcttgcaaagcgcgagccagcgttattgatagtagccgcagatgggcgtacgcgcggtgaacagggtaggaaatgtgagcggaaacagggaaataaagcactgaaggcgggcatattgccctaaaaaggggcacaaaaaaaccggcccgtgggccggttgattcactatcaggctgaaattacagcttggcagcgttttcagacaggtattttgctacgccgtctggggaagcgcccatacctgctttgcctttttcccactgagccgggcacacttcaccgtgctcttcgtggaattgcagcgcgtcaacggtacggatcatttcgtcgatgttacggccgattggcaggtcgttaaccacctgagcacgcacgatgccgtctttgtcgatcaggaaggagccgcgcagcgcaacgccggcttccgggtgttcgatgccgtaagctttctggatttcacgcttaacgtcagcaaccattgcgtatttcacttcaccgatgccgcctttgtcgacaggggttttacgccatgcgttgtgaacgaattctgagtcgaaggaaacgccaaccacttcaacgccacgcttctggaactcttcatagcggtgatcgaaagcgatcagctcggaagggcatacgaaggtgaagtccattggccagaagaacagcacggctggtttgccgttcaggtgcttcttcaggttgaagttttcaacgatttcgccgctacccagtacggcagctgcagtgaagtcaggggcttgacgagttaccaggaccataattactcctgtaataggtgttaaagggtggatgtaaaaaacaagggccagtataggggccgtgacttggtgaataaagggtaaaagaccaatcgatgagatagctttcacctatcaaagtcgttgatataatttatcgagctttaaaaataaccttttcccacaaaagggcaagcggcaaaacgtaaattcttgcaaggcgctgcaatttcaaacgcttgggcttgacctcagagcgttttttccttcgcctgccgcatcatttgcggataaaactgccagaattgtgtttcaagctgatgataatgttgttcgacgtcggcgaacgagccggccagcgcctcaaggcgcgggcggcggctggccatgccctgcagcacccgggcgatgaacggcaattcggcgtagcgttccagccagcgctccggccacagatagccgttcaggttctgaaaacgcggcggcgtgagcggcaggtaaggttcgatctggctgcgggcttcctgggtgaactggtgcagatcgcgcgagggctccagctgctgccagtggcgcgccagaaaatggtcccacaccacgtcgagggtgatcggcgccacgcggcggtagggggcgctgaaatagtcgcggcaggctttcacctgcggcaggctgtcggtcaacacgtcgacgcggcggtgcatcatgatgccggccaccacatcgggctggtagtcggcggcgggattgccgcgcacgaagtcggccagcaggttgcccagcagcgagctgtccgccagcatggccaggtgaagatgagcgagaaaattcatccctcaactatacctgaagtcaggcaaatcctccttatttcttgccgctgaccgcccccggctttagactaggccgcctgttttttaccaaccagtcctaaattgaagaagtgaatacccatgcgcgtcgctgatttttcgtttgaacttcccgaatccctgattgcccattatccccaggccgagcgcagcgcatgccgcctgctgcagctggacgggccgagcggggcgctgacgcatggcgtattcaccgatctgctggacaagctggaggccggcgatctgctggtgttcaacaatacccgcgtgatcccggcgcgcatgttcggccgcaaggtcagcggcggcaagattgaagtgctggtggagcgtgtgctggacgaccatcgcgtgctggcgcacgtgcgcgcgtcgaaagcgcccaagccgggcgccgagctgctgctgggggatgacgagagcatcgccgccaccatggtggctcgccacgagacgctgttcgagctgcgcttcaacgacgagcgcgacgtgttcactatcctcaacgccgccggccatatgccgctgccgccgtatatcgctcgcccggatgaagacgccgaccgcgagctgtatcagacggtttatagcgagaagccgggcgcggtcgccgcgccgaccgccggcctgcacttcgacgaaccgctgctggcggcgctgcgcgccaagggcgtggaaatggcgttcgtgacgctgcacgtcggcgccggcaccttccagccggtgcgcgtggaaactatcgaagatcacgtgatgcacgccgaatacgccgaagtgccgcaggaggtcgtggatgcggtgctggcctgcaaagcgcgcggcaagcgcgtggtggcggtgggcaccacctcggtgcgttcgctggaaagcgccgcggcggccagcaaagaggcgctgattgcgccgttcttcggcgacaccagcatctttatctatccgggctatcactaccaggtgatcgacgcgctggtgaccaacttccacctgccggaatctaccctgatcatgctggtgtcggccttcgccggctataaaaataccatgaacgcctatcagcaggcggtagccgagcagtatcgctttttcagctacggcgatgcgatgttcatcagccgtaatccgcaggcggaaaacgaatccgtcggcggctaaattcccgggctgcgcgcacggcgcggccccgtttcaacgacatcagactgtttctctgatgctggaggctttgtgaagtacgaactacaaactaccgatggccgcgctcgccgcggccgcctgattttcgaccgcggcgtggtggaaaccccggcctttatgccggtcggtacctacggtacggtcaagggcatgacgccggaagaagtgaaagaaaccggcgcgcagatcctgctgggcaacaccttccacctgtggctgcgcccgggccaggagatcatgaaactgcacggcgatctgcacgacttcatgcagtggccaggtccgatcctcaccgactccggcggtttccaggtgttcagcctgggggcgatgcgcaagatcaaagaggaaggcgtgtacttccgcaacccgatcaacggcgacaaggtgttcctgagcccggaaaaatcgatggagatccagtatgacctgggctccgacatcgtgatgatcttcgacgaatgcacgccatacccggccgactgggactacgccaagcgttcgatggaaatgtcgctgcgctgggcggagcgcagccgcaagcgtttcgacgaactggaaaataaaaatgcgctgttcggcatcattcagggcggcgtttacgaagatttacgtgatgtttccgtcaaagggctggtggatatcggctttgacgggtacgctgtgggcggcttggctgtaggcgagccgaaagaggatatgcatcgcattcttgaacacgtttgcccgcaaattccggaagataagccacgctatttgatgggcgtcggcaagccggaagatttggtggaaggcgtgcgccgcggcatcgacatgttcgattgcgtcatgccgacccgcaacgcccgcaacggccatttgttcgtgactgacggtgtggtaaaaatccgtaatgccaagcacaaggatgatacttctccgctggataaggactgtgattgctacacttgtcgccattacagccgcgcctacttgcaccatctcgaccgttgcaacgaaatattgggtgctcgactgaacacgattcataacctgcgtcactaccagcgcctgatggcgggtttacgccaggctatcgaagagggtaaattagagcagtttgttgcggatttctatggtcggatcggcaagccgattccgcctttaaacgcttgatctaataattgataacttaatgagggaatttcaatgagctttttcatttctgacgccgtcgcatccgcaggggctccggctcagggaagcccgtactctctgatcattatgctggtggtgttcggcctgatcttctacttcatgatcctgcgcccacagcagaaacgcgcgaaagatcacaagaagctgatggactccatcggtaaaggcgacgaagtgctgaccaccggcggcctgatcggtcgcgtgaccaaagtggccgacaccggcatcatcgccatcgcgctgaacgacaccacggaagtgatgatcaagcgtgacttcgtggcggccgttctgccgaaaggtaccatgaaggccctgtaatcttttttcccgaagggaattgccgtgctaaaccgttatcctttgtggaagtatctgatgttgatcgtcgtgatcctcgtcggtctgctttatgcgcttcccaacatctacggtgaggatccggccgtacaaatcactggcgcgcgcggcgtcgccgccagtgaaactacgctggaccaggtccgtaccgtattagaaaaagacaacatcgcgagcaagtcgattgcgctggaaaatggcgccatcctggctcgctttaaagatcctgacgttcagctgcgcgcccgcgaagcgctggtgaccgagctgggtgacaaattcgtcgtggcgctgaacctggcgccggccacgccgacctggctggccatgctgggcgcagagccgatgaaactcggcctggacctgcgcggcggcgtgcacttcctgatggaagtggacatggacaccgcgttgagcaagctgcaggaacagaccatggataccctgcgcagcgagttgcgtgagaagggcattccttacgcgtctatccgcaagctggacaacaacggcgtggaagttcgcttccgcgacgatgcggcccgtgaccaggccatcagctacatcggcccgcgtcagcgcgatctggtgctgtccgccaacggcgccaacaccatgaaagccaacctgacggacgcccgtctgagcgaagcgcgcgaatacgccgtacagcagaacatcactatcctgcgtaaccgcgtcaaccagctcggcgtcgccgaaccgctggtgcagcgccagggcgccgaccgcatcgtggttgagctgccgggcattcaggacaccgcgcgcgccaaagaaattctgggcgccaccgcgaccctggagttccgtctggtgaacaccaatgcggacgccactgcggcggccaacggccgcgtgccgggcgactccgaggtgaaatacacccgagacggccagccgatcgtgctgtacaagcgcgtgatcctgaccggtgaccacatcaccgactccacctcgagcaccgacgaatacaaccagccgcaggttaacatctcgctggacagcgccggcggcacgtcgatgtccaacttcaccaaggataacatcggcaagccgatggcgaccctgttcgtggagtataaggacagcggcaagaaagacgccaacggccgtgcggtgctggtgaaacaggaagaagtgatcaacgtggcgaacattcagtcgcgtctgggcaacagcttccgcatcaccggcatcggcaacccgaacgaagcgcgtcagctttcgctgctgctgcgtgcgggtgcgctgatcgcgccgattcagatcgtcgaagagcgcaccatcggtccaaccctgggtcagcagaacatcacccaaggtctggaagcctgtctgtggggcctggtggcgtccatcgtcttcatggtggtctggtaccgtaagttcggcgtgatcgccaccacggcgctggtcgccaacctggtgctgatcgtcggcgtgatgtccctgttgccgggggcgacgctgaccatgccgggcattgccgggatcgtgttgacgctggcggtggcggtcgacgccaacgtactgattaacgaacgtatcaaggaggagctgaagaacggccggtccgttcagcaggcgatccatgagggctataaaggcgcgttctccagtatcgtcgacgccaacatcaccaccctgatcaccgcggtcatcctgtacgcagtgggcaccggttcgatcaaaggctttgcgatcaccaccgctatcggtgtggcgacgtccatgttcaccgcgattgtcggtacccgtgccatcgtcaacctgctttacggcggcaaacgcattaacaagctgtctatctgaggagtgcgttgtggcacaggattatactgttgagcaactcaactacggccgtaaagtctacgactttatgcgctgggactatttggccttcggcatctcgttgctgctgttggtcgcgtcgattgtcaccatgtcggtgcgcgggtttaactggggtctggatttcaccggcggtacggtgattgaaatcaacctggagaagccggctaacctcgacctgatgcgcgatacgctggagaaggccgggttccaggatccgatcatccagaactttggcagcagccgcgacgtgatggtgcgcatgccaccggcgaccggcaccgcaggccaggaactgggcaacaaggtgatcggcgtgatcaacgactcggtggataaaaacgccaccgtgaagcgtatcgagttcgtcggcccgagcgtgggcagcgaactggcgcaaaccggcggcatggcgctgctggtggcgttgatctgtatcctgatctacgttggtttccgcttcgaatggcgcctggcgctgggggcggttatcgcgctggcgcacgacgtgatcatcacgctgggcgtgctgtcgctgttccacatcgagattgacctgaccatcgtcgcgtccctgatgtcggttatcggttactcgctgaacgacagcatcgtggtctccgaccgtattcgtgagaacttccgcaagatccgccgcggcacgccttacgagatcatgaacgtgtcgttgacccagacgctgagccgtacgctgatgacctccgggaccaccctgatggtggtgctgatgctgtacatcttcggtggcgcgatgctgcaaggcttctcgctggcgatgctgatcggcgtgtcgatcggtaccgtctcctccatctacgtcgcgtccgcgctggcgttgaaactggggatgaaacgcgagcacatgctgcagcaaaaagtggaaaaagagggcgcggatcagccttcgattctgccttaaccgccgcagtattcagcgaaatgagaaggagcgccgccggcgctccttttttttgcctcgagttttcagtgttgctgcaccaccgccggttgggcggtcgaaaccagactgtgcagacggatatagcccagctgttccggcgtcaggccgctgaagcgcagctcaaagtcctggccgggtttcggcagcagcgagtcggcgctggcgatcggttgcgacagcgcctcggcggtcaacggccgcccggtggcgtcgtccagttggccccattccaccaccgcgttgaacggcggcagcgtggcctgtgagagggtgcgcacatgcagctgcgcctgcgtgccgttggcttcgctcttgatgtggctcagcgaaacgctcagctcgccgatgccgctctgcaaacgggcggcgctgcgggccgccggcagcaggtagacgccgttgtcggagtgctgattgagcatattctgccgctccagcgcggtggtttgatcggtcagcacgctcactttctggttcagcgcggcgacctgatggcgcagttgagggacggcggcgttgtgcgcgcagcctgccagcaacacggcggcggcgagcagggcgattttggggtaacaggttgtcatgacggcgatttcctatgctgaatctcctattatcagcttagtccgcccggaggggaaagtcatatcggcgccgcttcccggctgcgtgtcgcaacaaatggccgccgccctttgttgtggctgcacttcggggtaaactgcatttatctataaaaacgtttatcaggacgtgttatgcattgccctttctgcgccgccgttgataccaaagtcattgattcccgcctggtgggggacggttcgcaagtgcgccgccgccgccagtgtctggtgtgcaatgaacgcttcaccaccttcgaggtggccgagttggtgatgccgcgagtgattaaaagcgatgaggtgcgcgagccgttcaacgaagacaaattgcgccgcggcatgctgaaagcgctggaaaagcgcccggtaagctcggacgacgtggaaaacgcccttaaccatatcaaatcccaactgcgcgccaccggcgaacgcgaagtgccgaccaaactggtgggcaacctggtgatggacgcgttgaaaaagctggataaggtggcctacattcgctttgcgtcggtataccgcagcttcgaagacgtgcgcgagttcggcgaagagatcgcccgcctgcaagactaaaggatctttcatgcatcacgacgaattttacatggcgcgcgccttcgaactggcgcgcctggggcgtttcaccaccgcgcccaatccgaacgtcggctgcgttatcgtgcgcgatggcgaaattgtcggtgaaggctatcacttgcgcgccggcgagccgcacgcggaagtgcacgcgctgcgtatggcgggcgacaaggcgcgcggcgccaccgcctatgtcacgctcgaaccgtgcagccatcacggccgcacgccgccctgcgccgatgcgctggtggccgccggcgtaacgcgagtggtcgcggcgatgcaagatcccaatccgcaggtggcggggcgcgggctgtacaagctgcagcaggccggcgtcgaggtgcgtcatggcctgatgctggccgaagccgaagcggtcaacctgggcttcctcaaacgcatgcgcaccggtttcccctatgtgcaactgaagctgggcgcgtcgctggacgggcgcacggcgatggcctccggcgagagccagtggatcacctcacccgaagcgcgtcaggacgtgcagcgcctgcgcgcgcagagcgccgcgattctcagcaccagcgccaccgtgctggcggacgatccgtcgctgacggtgcgttgggatgagttggatgccgagacccagcgcctctatccgcgcgaaaatctgcgtcagccgctgcgcatcctgctcgacagccaaaatcgcattaccccacagcaccgcgtggtgcagcagccgggcgccacctggctggcgcggctgcaggcggatgaacagacctggccgcaagacgttgagcagtttatctgcccggcgcacggcggcggcgtcgatctggtggtgatgatgatgctgttggccaagcgccaggtgaattcaatctgggtggaggcgggcgcatcgctggccggcgcgctgctgcaggccggcctggtggatgagctcattttgtacatcgcgccaaaactgttgggcgataatggccgcggcctgtgtcatttgccgggccttgagcgtctggccgacgcaccggaattcgtctttagcgacgtgcgccaggtcggccccgatctgcgtttgcgcctgcgggcgaaacactgaatctcgcgcccgcgcgccggttttacaaaagcgccgcgcaggcgatgaaagaatatgatagaatccgcccccctgcggggtattgaacccatttttaaggaaagcccatgaaagttatcgaaggtgttgttgctactccaaatgcccgtgtggcgatcgcaattgcacgttttaacaatttcatcaacgacagcctgctggaaggcgccatcgacgcgctgaaacgcattggtcaggttgctgacgacaacatcaccgttgtctgggtcccgggcgcttacgagctgccgttgacggcgagcgtattggccaaaaccggcaaatacgacgcggttatcgcgctgggcaccgttatccgtgggggcaccgcgcacttcgaatatgtggcgggcgaagccagctccggcatcggcaacgttgcgatgaatgccgaaatcccggttgcctttggcgtgctgaccaccgaaagcatcgaacaggcgatcgaacgcgccggcaccaaagcgggcaacaagggcgctgaagccgcgttgaccgcacttgaaatgattaatgttatcaaagctattaaagcctgaatttagttaaggggaattccgtgaaacctgctgctcgtcgccgcgctcgtgagtgcgctgttcaagcgctttactcttggcagttgtctaaaaacgaccttgccgatgttgaacaccagttcctgacggagcaggatgtcaaagatgttgacgtcgcctattttcgcgagttgctgtccggcgcggcagtgaatgcaggtatgctggacgaactgatggcgccatacctgtcgcgtcagctcgaagagctgggccaggtggagcgcgcagtgctgcgcgtcgcgctgtttgaactgaaaatgcgcgaggatgtcccttacaaggtggcgatcaacgaagcgatcgagctggcgaaaaccttcggcgcggaagacagccacaagtttgtgaacggggtgctggataaagtggcgccaacccttcgcaagaaaaagtaaaacattaaggccggtatccccggccttaatttcttctcgtggaatatcgatatggcatgcggcgaatttgacctcattgcccgctattttgaccggtttaagcgcgtgcgccgggatgtacagttgggcattggagatgactgcgcactgctggcagtgccggaaaaacagctggtggccgtcagtaccgatacgttggtggcgggcgtgcacttcttaccggacatcgatccggccgatctcggttataaagcgctggcggtcaatctgagcgatctggcggcgatgggcgccgatccggcgtggctttcactggccctgaccctgccggaggtgaacgagccttggctgaaggccttcagcgacagcctgtttgatcagctcaactattacggcatgcagctgatcggcggtgataccacgcgcggcccgctgagcatgaccttgaccattcaggggctgatcccggccggccgggcgttaacccgcagcggcgcgcgcatcggcgactggatctacgtgaccggcacgctgggcgacagcgccgccggtctggcgattctgcaggatcgtctggcggtgccggaggcggcggcgcgcgattacctgatcgctcgccatctgcgcccgcagccgcgggtgctgcaggggcaggcgctgcgcgacctggccagctcggcgatcgacatctccgacggcctgatctccgatctgaaacacatcctgaaggccagcgactgtggcgcacgcatcgtgctggacgagctgccgatgtcgcaggcgctgagcagccacgcggatgccgagcaggcgctgcgttgggcgctggcgggcggcgaagattacgagctgtgcttcaccgtaccggagatcaaccgcggcgcgttggaagtggcgctgagccacctcggcgccgactacacctgcatcggccaaattggtccgctgtctgaaggcatccgctattatcgcaacgacgaagcggtagagctggactgggccgggttcgatcatttcaatgcggagccgggcactcatggatgaagccaagcgtcggctgcggatgagcaatccgtggcacctgctggccaccggttttggcagcggtttgtcgccggtgatgccgggcaccatgggatcgctggcggcgatcccgttctggctgctgctgatccagctgccgtggcagctctactcgctggcggtgatgttcagcatctgtatcggcgtctatatttgccaccgcacggcaaaagacatgaaggtgcacgatcacggcagcatcgtctgggatgagttcgtcggcatgtggatcacgctgatggcgctgccggtcaacgactggcgctgggtcgccgccggtttcgtcatcttccgcattctggatatgtggaagccgtggccgatccgctggttcgaccgcaacgtgcatggcggcatgggcatcatggtcgacgatatcatcgccggcgtgctgtccgccggtatcatctacctgattggccaccactggccgatcgggctgttctgacagacgggcgcggcgtttcgcgcccgctactctttattcaaaccccgtcacccgatgcggcacgtaagccgtctccagttccgccacctcttgcggcgacagactcaaatcgaccgcggcgatggcgtcatccaactgctcgctgcgcgaggcgccaacgatcggtgcgctgaccgccggcttgttcagcagccaggccagcgcgatctgcgcgcgtgaaacgccgcgttcttcggcgaggctggcgacgcgttcggcgatgatggcgtcgatgccttcagtttcctcgtacaggcttttgccgaactggtcggagaccagccgcgcggtggtttcgccccaggggcgggtcaggcggccgcgcgccagcgggctccacggcagcacggcgatgccttcggcggcgcacagcgggtgcatctcgcgctcttcttcgcgctggatcaggttgtattgatcctgcatgctgacgaagcgcgtccagccgtgcagatcggcggtgtacagcgctttggcgaactgccaggcgtacatggaagaggcgccgatgtaacgcgccttaccggctttcaccacctcgtgcagcgcttccagcgtctcttccagcggcgtttcgtaatcccagcggtggatttgcagcaaatcgacatagtcagtgcccaggcgccgcaggctgtcgtcgatggactgcatgatcttggcgcgcgacaaaccgcgctccaggttgctcagcgggaaatagaccttggtggcgaccactacgtcttcgcggcgtgcatagtcgcgcagcgcccggccgaggatctcctcgctgctgccgtcggaatagctgttggcggtgtcgaaaaagttgatgccggcttccagcgcctgtttcagcagcgggcggctgctctcttccggcagcgtccaggcgtgattgccgcggttcggttcgccgtaggtcatgcaacccaggcagatgcgtgagacgttcagatcggtgttgcccagtttcaggtacttcatgtttgcctcccattcacagctcagacagtaactgtagcgcggatcccggagggcggaaacgaaaacgcccccgggagcggaggcgttttttcaggcgcgggcggcgattactgcgccagccaggtttcgatttggcgctgaatgccggcggcgtccagccccagatcggcgcgcagctcttcctgggtgccctgcgagacgaagctgtccggcaggccgaggttcagcaccggcaccggacggcgtttggccatcagcagttcgttgacgccgctgccggcgccgcccatgatggcgttctcttccagcgtgaccagcgtttcatggctggcggccagttcgagcaccagctgctcgtccagcggcttgacgaagcgcatgtcgaccagcgtggcgttgagcgcttccgccgcttgcgcggcctccggcagcagggtgccgaagctgagaatggcgatcttttccccctggcgacgcaccacgcctttgccgatcggcagcaggctgagcggctccagcgccgcgccggtgccggtgccgcgcggatagcgcacggcgctcgggccgtcgttgtagtgatagccggtatacagcatctggcggcattcgttttcgtcgctcggcgtcatgatcaccatggtcgggatgcagcgcatgaacgacagatcgaacgccccctggtgggtctggccgtcggcacctacgatgccgccgcgatcgatggcgaacattaccggcaggttttggatcgccacgtcatggatcagctgatcgtaggcgcgttgcaggaaggtggaatagatcgccaccaccggcttgtagccgccgatcgccagcccggcggcgaaggtgaccgcgtgctgctcggcgatcgccacatcgaaatattgctgcggatagtcgcgcgagaactgcaccatgccggagccttcgcgcatcgccggcgtgatcgccatcagtgagctgtctttggcggcggtttcacacagccagtcgccgaagattttcgaataggtcggcagaccgccggcgcttttcggcagcgtgccgctggcgggatcgaacttcggcaccgcgtggaagctgatcggatccttctccgccggcgcgtaaccgcggcctttcttggtcatgatgtgcaacagctgcgggcctttcagatcgcgcatgtttttcaacgtggcgaccaggccctgtacgtcgtgcccgtctaccggaccgatgtagttgaagcccagctcttcgaacagcgtgcctggcaccaccatgcctttcaggtgctcttcggtgcgtttcaccagctccttgatcggcggcacgccggccagcactttcttgccgccttcgcgcagggtggagtaaagcttgccggacagcagctgcgccagatggttgttcagcgcgccgacgttttccgagatcgacatctcgttgtcgttcagcaccaccagcatgtccggattgatgtcgccggcgtggttcatcgcttcgaacgccatgccggcggtgatggcgccatcgccgatcacgcacaccgtgcggcggcctttgccttcacgctctgccgccaccgccatgccgaggccggcgctgatcgaggttgacgaatggccgaccgacagcacgtcatattcgctttcggcgcgccacgggaaggggtgcaggccgttcttttgccggatagtggcgatccgatcgcggcggccggtcaggattttgtgcgggtaggcctggtggccgacgtcccacaccagatgatcgaacggcgtgttgtagacgaaatgcaacgccaccgtcagttcgacggtacccagcccggaggcaaagtggccgctggagcgactgacgctgttcagcagatattgccgcagctcatcgcacagcttcggcaagctctctttgggcagtgagcggagttcctcggggttttccgctagcgccagggttgggtatttggctatatcaagactcattcgatactcatatcagaggagttaacgtcacacgttaattgtcgcgttcaataatgaagctggctaacgctcgcaatggcgctgtgttataagattgcgctgccaaagtgtctaatgcagctaatgcttcctgatagagatcccacgcttttgctttcgcgctgtcaagcccgagtaacgccgggtaggtactctttccgtgttgttggtccgctccctggcgcttgccgattttctcagtttcgccgacaacgtccaaaatgtcatcctgcacctggaacgccaggccgaccgcggcggcgtaacgatccagctgcggcagcgccgctcgtcctgcttcgccggcgctcagcgcgcccagacgcaccgcggcgcggatcagcgcgccggttttgtggcggtggatctgctccagcgcctgcaggtcgacgtgcttgccttcggcttccagatccagcgattggccgccgcacatgccggctacgccgctggctgtcgccagttcggagaccatcgccagccgatcgcgcagcgccacgtcgggcatttcggcatcggccaggatcgaaaacgccagcgtttgcagcgcatcgccggccaggatcgcgttggcttcgccgaatttaatgtgacaggtcggctggccacggcgcagatcgtcgtcgtccatcgccggcagatcgtcatggatcagcgagtaggcgtggatgcattccaccgccgccgccggcgcgtccaggttgctcagcgacacgccgaacatctggccggtggtgtacaccaggaacggacgcagacgcttgccgcccagcaaggcgccgtgacgcatcgccgccaccatgttgccgtcgttgaacggcagcggggcgatgaagtccagcagcgcgcgatcggcgcgccggcggaaaatctgcagttgatcggcaaaagcggccgatggggcgatctcagacatgtcggttactcggcatccggtgtgaaaggcgccagcgccgcatcgtcggcgctgtcgttaagaagtatctgcacacgctgttccgcctgttgcagtttctgctggccttggcgcgccagctgcacgccgcgttcgaattcgttcagcgcgtcttccagcggcagttcgcccgactccagacgcgtcacgatgctttccagctcgccgagggcgctttcaaagctggcagtttgctctgtactggctgattgtgctggttttttcggcataattttctttttacgtcatcatgtgaaccgtggcgccagagcctatcctagcggatcttgattagcaaatcatggcgctcatgtgtggttttgtgcgcagagcacggcgatatggtgatatactccgcgccgtaattcttatctgacaacaaagaccgccatgaagtttatcattaaattgttcccggaaatcaccatcaagagccaatctgtgcgcttgcgctttatcaagattctctcgaccaatattcgcaacgtcctgaagcagtatgatgaaacgctggcggtcgtccgtcactgggatcatatcgaagttcgcgccaaagatgaaaaccagcggccgatcattgccgacgcgctgacgcgcattcccggcatccaccatattctggaagtggaagatcgcgcctataccgatatccaccacatcttcgagcagacgctggaagcctaccgcgcccagctggaaggcaaaaccttctgcgtgcgcgtcaagcgccgcggcaagcaggcgttcaattcgcaggacgtggagcgttacgtcggcggcggtctgaaccagcatatcgacagcgcgcgcgttaacctgacccgaccgcaggtcacggtaaacctggagattgaagacgacaagctgatgctggtcaaacgccgtctcgaaggcatcggcggttatccggtcggcactcaggaagacgtgatgtcgctgatttccggcggtttcgactcgggcgtgtccagctatatgctgatgcgccgcggctgccgcgtgcacttctgcttcttcaacctgggcggcgccgcgcacgagattggcgtgaagcaggtggcgcactacctgtggaaccgtttcgccagctcgcacaaggtgcgcttcgtcgccatcgacttcgagccggtggtgggcgagatcctggagaaggtcgacgacggccagatgggcgtggtgctcaagcgcatgatggtgcgcgccgcttcgcaagtggccgaacgctatggcgtgcaggcgctggtgaccggtgaagcgctggggcaggtgtccagccagacgctgaccaacctgcgcctgatcgataacgcgtccgacaccctgatcctgcgcccgctgatttcgcacgataaagagcacatcatcaagctggcgcgcgaaatcggcaccgaagacttcgccaaaaccatgccggaatactgcggcgtgatttcgaagagcccgacggtgaaagccgtcaaggccaagatcgaagaggaagagagccacttcgatttcagcattctcgatcgggtggtgagcgaagcgaagaacgtcgatatccgctctatcgccgagcaggcgcaggagcaggtgaccgaagtggaaaccgtcgcggccttcggcgccgacgaggtgatcctggatatccgttccaacgacgagcaggaagagaagccgctgcagctggaacaggttgaagtgaaagcgctgccgttctacaagctgagcactcagttcggcgatctggatcagagcaaaacctatctgctgtactgcgagcgcggcgtaatgagccgcctgcaggcgctgtacctgctggagcagggcttcagcaacgtgaaggtttatcgcccgtaacgcgggcagcggcgtaaacgagaggggctgaaccggtgttcagccctttttttatcggcaagccgctcagtcgcggaaatcgtacatcccggggatcagcaccagctgcgcggcgatctccgccgctttggccttgccgagcagcagatcgatcagcttcagcgcgaactccatcgcggtgcccggcccctggctggtgagcagcttgacgcgcgcgtcgtacaccacgcggcgttccatccatttatccgccggtatctggtctttcaggcccgggaagccggtcatgttgccgaccgggaacagatcgtggtgctgcagcaccagcgccggcgccgcacagatggcggcgacgatattcccctgcaggtgcatctgccgcactttttccaccagcaacgggctgtcgcggaagcattccgcccccttcaggccgccgggcagcacgatggcgtcgaaaggctcatcgacgatcgccaccagcggcgcgtcggccagcagcttgacgccgcgcgaacaaacgatagtcagctcgccgtcaccggcgacgctggcggtagtgactttaacgcccgcccgcaccagcagatcgatggtggtgacggcttcggtttcttcgctaccaggtgccaggcaaaccagcgccgatacgctcatattcattttcctttcgtttaatcaattcaaacagccgcgcattctccggcagcgtgaggccgtgactgcgcgcacggcgcagcaggtagccggtgatgtagtcgatctcggtatgccgctggctgcggatatcctgcagcatcgacgaaacgttgtcggcggtgctgtggatcacgtccatcacatattgcatcaggccttcgcaggaggtgtggtagccctccatcgccatcacgctggcgacttcacgacacagcgtttcgatctgctccgggtagcgctgcagatcgccgttgcggcagccgtacagcgccgtcagcgggttgatcacgcagttgaccgccagcttgcgccagttggccgaggcgatgttgttgtgccaggcgacgtcgggcagcgcctgatgcagcacttccgccaggtggctgagatgctgggcggccggtgaggtggggccgatgtgggtgatgccggtggcgacgtgaataatggtgctgccttcgtggcgcgcggcgtgggtggtggtgccctgcaggatgggctggccgttttgcggcagctcctcctgggtacccatgccgttgtgcagcagcaaaatggcgcactgagggttcagcttcggcagcagcgcactgaccgcgctggagacctgccaggctttcagcgtcaccagcagcagctcgctctgcgcgaggtgctcaggatcgttggtgggcaaattgcgattaaacgagacgccttccggctcgatcacgttcacggcgcaaaaaggctgcggcactcttagccatccctgtacatcgtggccctgctgatacagccgggagagccacagttgtccgagcgcgccgcaaccaagaatggttattttcattcagtctccttggaaacacgggaataccgctcaattaccgtgatctaactataggctttatggcagcctgaagcgctatccctgcgtgcgttcagcagattttgtctgaggcggcaaagcggttatcatgctcggcatcaaaatcgcctaagctattaggcactcattcaggaggaagaagtatgccatctttcgacatcgtttccgaaattgatatgcaggaagtgcgtaacgccgttgagaacgccacccgcgatctcggcacccgctgggattttcgcaacgtgccggccagctttgagctaaacgagaaaaaccaaagcatcaaggttgccaccgagtctgatttccaggtgcagcagctgctcgacattctgcgcgaaaagctgagcaagcgcagcatcgacggcgccgcgctggagatcccggaagagtttacccacagcggtaaaacctacagcgtggaagccaagctgaagcaggggattgaaacctctgtagcgaagaaaatcgtcaagctgatcaaagacagcaagctgaaggtgcaggcgcagatccagggcgaagaagtgcgggtgaccggcaagtcacgcgacgatttgcagagcgtgatggcgctggtgcgcggcggcgatctggggcagccgttccagttcaagaacttccgcgattaatctcgacggggccggcattgccggccccgtttctttacagcgaattgaccagcgcttccagctgaccgcgattggtctgcttggtgtccaccttgacgtaggcgctgcgctcttccggcaccacgatcgcctcggccacgccgggctgcgccttcaggcggctttccagcgccgaatccttcaccgccagttcagacagcgtgatgcgcaggctgctgacatacggcggttctttcatggtgctgctgaccaagaaccagacggcggccaataccgcgccggcgataaacaccaggcctgccccctgcaaaccgtacagccagccgccgaggctgccgccgatcgccacgccgataaactggctggtggagtagactcccatcgcggtgcccttatagccggccggtgattctttgctgatcagcgaaggcagaatggcttccatcacgttgaaggccatgaagaacagctgcacgccggcgatgatgccccacaggtgcgcgccggagagccacagcagcacttcggcgcaaaacagcaccgccacgcagcccataaacacctgcttcatgcggcgatatttttcggcatagatgatgaaaggcaccacggcggcgaacgacaccagcatggtcaccaggtagacgatccagtgttcgctggccgccagcccggctttctccatcgccagcggcagcgccacgaagctcgacatcagcaggatatgcagacacatgatgccgaagttgagcttcagcaggcgcgagttgctcagcactttgcggaaactgccgcgcacgatgctggactcgcggttcaacaggtgagtatcggcggaaggcaccaccgccaatgtgatggcgatgccggccagcgccagcacggcgatcatccagaacagcgcatgcaggccgaaggcgtgggtaattatagggcccagaaccatggcgatggcgaaggtgatgccgaagctgacgccgatgaacgccatcgctttggtgcggttctgctcgcgggtcagatcggagagcagcgccattaccgcggcggcgatcgcgccggagccttgcaacgcgcggccgaggatcacaccccagatagagtcggtcgcggcggcgatcacgctgccgagggcaaagatcagcaggccgccgacgatcagcggcttacggccgatgcgatcggacaccagaccgaacgggatctgaaacaccgcctgcgccaggccgtagatgccgatggcgatgccgatcagcgcttcgctggcgccgttgagcgccatgccgtaggtggtcagcaccggcaataccataaacatgccgagcatgcgcagggagaatacggtgcccaatccccaggtagcgcggcgctcctgcggggtcattgaattatcgttcacatcaaacctcggtaaaaaccatgccatcagacgttgagacagcgcctgatggcatgatttctgtaaagctgcgtcattttagtgtgcggggcagggggggtaaatcgaatgttgtttaacagatattacagtttggccgcttttcggcgtgacaaataaaatgggccgcaaaagcggcccattcacagatgatttggcttaccaaacgtaggtcaccagcgcttcaggcgccgccgtggcgctgaagtcgatcgacatcatcacgctcagcgaggtgatggcgacgatggagaacacgaacagtttgcgcgcccagacgctgtcgttttcggttttataaccgcgcagcgccatgcccagccaccatacgctcaccgccgcagcgacgatcaggtatttgtagccggcgtagcccaccagggtcagcatcagcgtggcgatcataaatgccaggatgtagaccgtgatgtggttcttggcgacggaaatgcctttcaccaccggcagcaccggaatgttggccgcctggtaatctttaaagcggaagatagcgatcgcataagaatgcggcatctgccacaggctaaagatagccagcaggatcaacgcgccggcgtcgaactcgttggtcaccgcgcagtagccgataaccggcggcgcggcgcccgacaagctgccgatcagcgtgccgtagaccgaatggcgtttcatgtacaggctgtaaacgccgacataaaccacgaagcccatcaccgccagccacatggccagcgggttggccgcgatatacagcaacgcgaagcccgcaatacccaacacggtcgcataaaccagggtgacactcggcgcgatcaggccttttaccagcacccgattcttcgttctctccattttcttgtcgatgtcgcggtcgatgtagttgttaaacacacagcccgacgcgaccaccaacgagacacccaccagggtggcgagaaacaggggatagtcgatgctccctttggaagcgagcaggaatcccccaacgacagaaattaaattgccgaaaataattcctggtttagtgacttgcaggtattgcttaatcatcacgtgcagctcagctcttaatcgaccatcatattgatgttgaggttgtacataatccagagtgaacctacaacaacgataccgatgatcatagcggtgaacagcaatgccaccaggttccagcgctcttccgatgaggtgttcatgtgcaggaagtaaaccaggtgaacaatcacctggataaccgccataccgacaacaaccgccaggatggtggaatgagaggcagtgccgttcattaccatcgcaaatggaattaccgtcaggatgatcgacaggataaagccgatcaggtatgacttcacgctgccgtggcttgcgccgccgtgagaggtttcatgggatgaatggctcattacataacccccagcaggtagacaacggtaaatacgcagatccagaccacgtccaggaagtgccagaacaggctcaggcacatcaggcgggttttgttggtcgcggtcaggccgaacttgctcacctgaatcatcagcacgatgatccaaatcaggccggaagtcacgtgcagaccgtgggtgccgaccagcgcgaagaagctggacaggaacgcgctgcgatccggcccgaagccttcggcgatcaggtgatggaattcatagatttccatcgccacgaagcccagaccaaacaggaaggtcaggaacaaccaggtgtttacaccgccaactttacccttgttcatggcgatcatcgccatgccgtaggtgatggagctgaacaacagcaggaaagtttcgaccagaacaaacttcaggtcgaagatgtctttgcctgagggaccgccagcggtcccgttcaccaggactgcataagtcgcgaacaagctcgcaaacaaaatacagtcgctcatcaggtagatccagaatccgaagactttggtctctcccgcgtcgtggtgcccatgctctgcatgggctgcgttatgattggtcagagtttcagttgacatggttcacgcctgctttacggatttgttcgtagtgttggttctcaatgcgctcgatttcatcaacctgcacatagtagtcaacatcgtgatcgaagctcttgccgatccagacaacgatcataccgatgaagccggccagagccatccaccagatttcccaaatcattgcgaaaccgaataccaggctgaagaaggcgatgataacgccggcaccggtgttcttaggcatatgaatcggttcgtatttagccggtttcttataagcttcacctttttctttcatgtcccagaattcatcacggtcatgaatctgcggcactacggcaaagttatagaacggcggtggagacgaagttgaccactccagagtacgagcaccccatgggtcaccggtcagatcgcggttctgctcgcggtcacggatactgacgaagatctgggtcagctggcacaggatgccgcaggcgatcagcgccgcaccgccggctgcaaccagcagcagagggtggaactcagggttgatgttctggctgatacgacgggtcatgcccataaagcccaatgcgtacagcggcatgaaggcggtgaagaagccgatgatccagaaccagaacgcgcggatgccccatttttcgttcagcgtgaagccgaaggatttcgggaaccagtaggtcaggcccgcgaagcaaccgaacaccacgccgccgatgatgacgttgtggaagtgcgcgatcaggaacaggctgttgtgcagcacgaagttcgcgcccggcaccgccagcagaacgccggtcataccacccacggagaaggtgatgatgaagccaacggtccacagcattgcggagttgagcttgatgcggccctgatacatggtgaacagccagttgaagattttcaccccggtcgggatggaaatgatcatggtggcgataccgaagaaggcgttaacgttcgcgccggaccccatggtgaagaagtggtgcagccagacgatgaacgacagaacggtgatcgcgatggttgcccataccagtgaggtatagccgaacaggcgttttctggagaaggtcgcggtgacttcggagaacacgccgaacaccggcagaaccaggatatacacctctgggtgaccccaggcccaaatcaggttgatgtacatcatcatgttgccgcccatatcattggtgaagaaatgggtgcccagatagcgatccagggtcagcagcgcgatggtgacggtcagaattgggaaagaaacgatgatcaggacgttggtacacagcgccgcccaggtgaacaccggcatcttcatcataggcatgccaggggcacgcatcttcagaatggtggcgaagaagttcacgccggtcagcagggtacccagaccggaaatctgcagactccagatccagtaatcgaccccgacgccaggactgtactctttacccgacagcggcggatacgccagccaaccggtctgagcgaactcaccgacccccagggagatgttgatcagcaccacgcccaccacgaagaaccagaagctcagggagttcaggaacgggaaggcgacgtcgcgcgcaccgatttgcagcggcaccacgacgttcatcaggccaaccacgaaaggcatcgccatgaagaagatcatgatgacgccgtgcgcggtgaagatctggtcgtagtggtgcggcggcaggaacccggcttcgccggcggacgccaacgcctgctggctacgcatcatgatggcgtcggcaaagccgcgcagcagcatgaccatcgccacgatgatgtacatgataccaatttttttatggtcgaccgaagtcagccattcgctccacagccacttccatttaccgaaatacgtcagcagcgccagcactgccaggcccccgacaataattgcggctacggtgaccatgatgatcggttcgtggtacggaaccgcatcaagtgttaattttcccaacatcagttattcctcggctccggcgtgagcagcatgttcacccatgtccataccttggctcatgtccatgccttcgtgcgcgcctgcgcccttgtgcatatccatgtcgcccatgaatttggcaattgtttctttgaacaaattcggtttgacagcggcaaagtactcaaccgggttgttttcactcggctctgccagtttgttaaagtcgtcggtggtgttcaggtttttagacgatgccttcaccttggccacccactgatcgaagtcgccttcggtcggggtaacgatcgcggtgaacttcataccggagaagcctgcgccgctgtagctgctggagatgcctttgtaggcaccggcttcgttgccgatcaggtgcagtttggtctgcatgccggccatcgcataaatctgtccacccaactgcgggataaagaacgagttcattaccgagttagaggtgatcttgaattcgactggaacatctttcgggaaagccagctcattaacggtcgcaatgccttgttccgggtagatgaacagccatttccagtcgagcgacaccacttcgatcgtcatcggcttcttgtcggtgacaatcggcttgaacggatcgagttcgtgggtggtcttccaggtaatggtgccaaggatggcgatgataatgataggaatggtccagacgaccgcttcgatcttgttggagtgggcccagttcggactgtacttggcgtctttgttggaagcgcgatacttccaggcaaaggcgaacgccatgaagataactggcaccactacgatcaacatcaatgcgattgcagtgataatcagtgtccgttgctcaacaccaattgctcctttgggattcatcaaaaccatatcgcagccactgagcaatacagtgcctgcgattaatgacagcatcccaatacttttattgtatttcttaagtctcatctaacgacctcaataacaaaggctcaattgtcgtttcatgtgtgcgggcattttacgggaaggttgcagtactgtaaacatgcttaagggagtgtcagcggcttgttgacactttctgttaagggggtcacagatgtaaccctgcgtgacaatttaccaatgacaacaacgcgttggcacgctgaatcgtgacgagcagcccgtatgttaaggaaaactaaaggtatgatgaatttggcgaagaaatgcgcggcggggaaatacgcagaaaaggtttatttaatgtaaaataattgtgtcttaaaggtgaatttaattttatttccgagtgcggcagtcggataaaaaaataatttccgcgccgattatctttttttaccgaaataaatatatccccggatcgctttttttttcggccggtgaaatcaccggccggtcagattatgccaaacgggtgcggcgcagggcgaggtaatccaacgtactgcccatggcgacgccgagcaggctcagcgcggcgccgacctgcagcagccgatcggccaactgcggggcctgagtccaatccagcgcattggtgataagcaacagcaaccacaggcccaacagcgaacagcctagcgtcagtaagcgcagcgcccaacggtaagattctgaaaactcagtgcgcggcataaaattgccatgctgctgggtgtgctccagcgtctgacgacagataccgagcagcagcaagccgggcagggcagcggcgatagagaacaggtagaacaacggccaaccgtgggcttcaacgaaccagccggcgatcgggccgacatagacgcgccctacggcggacagcgccgacagcagcgcgaactgggtggcggagaacgaccggttgcacagcgtcattagcagcgccacgaaggccgcggtgcccatgccgccacacagattttcgaggaagatggcgctgcccatggtgagcaggctcttgtcggtcaccgccaggatccaatacccgagattggagaccgcctgcaggacgccgaacagcatcagcgcgcggaacaggctgagacgttgcatcagcacgccgccgaacagggcgccgacgatggtcgcgaacaggccgagggttttgttcaccagcccgacttcaccggcgtcgaaccccacgccgcggatcaggaaggtggtactcaggctgccggcgaaggcgtcgcccattttgtacatcacgattagcagcaggatcagccaggcgttgttgcggccgaagaaatcgcgcagcggcgcgacgaccgcctgttccatggtgcgcggcgccgggatgctttcatccggctccggcgccaacagcgtggcggccacgccgatcagcatcaatccggccatcagccagtaggtggcttgccagccgaaatagcgatctgccagccacagcgccaggccgccggaaaccagcatcgccagccgataacccagcaccgagatcgccgcgcccgtgccgcgttcttcggctttcagcagatcggttttataggcgtcgaacacgatatcttgcgaggcggagcagaacgccaccagcaccgccaacgccgccagccaccacaggtgctgcgcgggttgcataaagcccatcgccacaatcgccgccaccagcaacagctggctgatcagcagccaaccgcgccgccgcccgagaaacggcggggtatagcggtccatgaacggcgaccagaggaatttgaagacgtaggcctggcctaccagcgagaagatgccgatggttttcagatcgatattttcgacggtcatccaggcttgcagcgtgccggaggtcaatgccagcggcagacccgacgcgaagcccagcagcagcagaatggcggagttacgctgggtgaagatgttcagatagtgtttcgacatgagttccctgtctgcgccgcccgatccgccgggcggcgccaggcgcgccgattagcgcgcgttttgcttgatgaaatcgttgacgctggtgtcctgagccatgtcggcgatcacgtcgcccagcacggagttgacggcgtcggtgatcttctcgttggtcgccgtgaaggcgccctgcacgttataggtcgagcggtaattcttcacctgcttgttgccgttcttcgcctgggcgatgatcgagatgtcggctttggtggtgatgttgtagcgcaggttaccttcggcgacgtccgcgtacaggttattgacgacgatttgcagcgccaccgggccgtcggcaccgatcatgtagccgcgtgcgcccatctgtttctccagcacttcctgcagcaggaaacgcagatcgcgcgatggcgtcagcgtgaccaactggccgtcgcggttcaccttggccagcgcctggtcggtgcgctgatccgcgccgttgatgctgacagtgatgccctgcagggtaggatcctgctgcggcagaacgattttcggcgtgacgttcagggtgttgctgctggtcgcgcagccggccagcagcagggcggccagcaaaggaagacaaagtttctttaacatgttttctgtctcattctcgatggatttagcaataatcagagcgggatagccgacaacaaattgccgacatcatagcatcgccgccgtgcggtggaagcgcggaaggcgcctgagtgacaaatttttacctgccgttgataaaaacacgcttttttggcccgctcaatcggataatcccccaagcggcggggatggcgctcatcatttgaccgcagaaaagagaaatttgtcccggcgatggtctaaacgggggaaaaccggctaatattgaactagatgggcacggtcctctgccggtgttgtaaggagatcctatgattcgcgagcaaatagaagcaaagttaagggcggcgtttgagcccgcgtatctggaagtcgttgatgaaagctatcgtcataacgttccggcgggttcagaaagccatttcaaagtggtattggtcagcgatcgcttcgtcggcgaacgttttttgacgcgccaccgctccatctacggcgtattgtcggaggagctggcggacggcgtacatgcgctggcgctgcacacctatacgctcaaagagtgggaaggtctgcaggataccgtgccggcctcgccgccgtgccgcggcgccggcacgctggcctgagggggaaattttcaggtatcagtggaactttgcccttgaattagggtattactactgacgaattttgaaacggcctgcgggccgtttctgtttttgacgacgacacggccgacgcgcaatgtggccaacgttcggtctgttttggcggcctttgggcgatcgaatcggcaaaagtgtgagttttagcgcgcctgcgccgcctagctttcctcgactcgccacgcatgcgccgctataatgtcgcgtcttatttttccggaatggtttcgggacgcttctgtcatcagggaactcggttcttatctgtagccgtcctggttcttggaacggagttgaccgagcactgtgatttttttgaggtaacaagatgcaagtttcagtagaaaccactcaaggccttgggcgccgtctctctattactgtaccggctgatactatcaagcaggcggtgaagaaagagctgatcaacgcagcgaaaagcgtgcgtatcgacggcttccgcaaaggcaaagtgccgatgaacatcgtggaacagcgttacggcgcctctgttcgtcaggacgtgctgggcgaagcgatgcagcgcagcttcgttgacgcgatcatcaaagaaaagattaatccggccggcgcaccaaactacgtgccgggcgagtacaaagaaggtgaagacttcactttctccgttgaattcgaagtgtatccagaagttgagctgaaaggcctggaaaacatcgaagtcgaaaaacctgtagttgaagtgaacgacgaagacgtcgacgcgatgctggataccctgcgcaagcagcaggccacctggaaagaaaccgatcgcgcggcggaagctgaagatcgcgtgaccgttgacttcaccggttctatcgacggtgaagagttcgaaggcggcaaagcgtccgacttcgtgctggcaatgggccagggccgcatgatcccaggcttcgaagaaggcctggtcggtcacaaagcgggcgaagagttctccatcgacgtgaacttcccggaagactaccatgcggaaaacctgaagggcaaagcggccaaattcgctatcgtgctgaagaaagttgaagagcgcgagctgccggaactgaccgaagagttcatcaagcgtttcggcgtggcggacggttccgttgccggcctgcgcaccgaggttcgcaagaacatggagcgcgagctgaaaggcgccgtgcgtaaccgcatcaagtctcaggcgatcgaaggcctggtgagcgcgaacgaaatcgacgtgcctgctgccctgatcgacggcgaaatcgacgtgctgcgtcgtcaggctgcacagcgtttcggcggcaacgagaagcaagcgctggaactgccacgtgaactgttcgaagagcaggcgaaacgccgcgtagtggttggcctgctgctgggcgaagtgatcagcaccaacgacctgaaagctgacgaagaccgcgtgaagacgctgatcgaagaaatggcctccgcctacgaagatccgagcgaagtcatcgaattctacagcaaaaacaaagagctgatgaacaacatgcgcaacgtggctctggaagagcaagcggttgaagccctgctggcaaaagcgaaagtgactgaaaaagccactaccttcagcgagctgatgaaccaaactcaacaggcgtaatgcctgcgtgccgggcgcgatgaacggcgcccccggtttcgcctggcgaaccggcgcacgatgaaaaagcccgcaacctcaggttgcgggcttttctttttgccacgttgctgattaatctcaggttaagcgggataatatgcactatatttaccctgttgcctggggaactggctggcatgataaaggtcagaataacggcatcgtttccggcgcgcggagaaaatcggcctctgggcttgaaatcgcgccgggctccccccatctgtaaagaatgattctggggctgtttgccaaagtgcgcgggataaaacaaccgtcgggtacgtgcggcgcgggtcgaatgcttgagcatagtcatcatggccgttctcaagtagaatcggcgtattagggtgacaccctggccgccaaggcaatttctattaggagacggtaatgtcatacagtggcgaacgagatcaatttgcaccgaacatggcgctggtgccgatggtggtagagcagacttcacgcggggagcgttcttacgacatttattcccgcctgctgaaagagcgcatcattttcctgaccggccaggtggaagatcacatggccaacctgatcgtggcgcaaatgttgttcctcgaagcggaaagcccggaaaaagacatttacctctacatcaactcgccgggtggggtaattaccgcgggcatgtcaatttacgacaccatgaagttcatcaagccggacgtcagcaccatctgtatgggccaggcgtgctcgatgggctccttcctgctgaccgcgggcgccaaaggcaaacgtttctgcctgccgaactcgcgcgtgatgattcaccagccgctgggcggctaccagggccaggcgacggacatcgaaatccacgcgcgtgaaatcctcaaggtgaaagcgcgcatgaacgaactgatggccgagcataccggccagccgctggagcagatcgagcgcgataccgagcgcgatcgctttatgaccgcggacgaagccgtggaatacggcctggttgacggcattctgacacaccgcagctagaaccacgcggcgccgatggactatagtaatcagagtgggcaggggctcgctctgttgtagcccctcggcgttcccgatatgagtttgggcgcactgccgccgtgattttcctgcgggacaagactaaagaagaggtttgactgatgacagataagcgcaaagacggttcaggaaagctgctgtactgctctttttgcggcaaaagccagcatgaagtgcgtaagctgattgccgggccgtcagtgtatatctgcgatgaatgtgtcgatctgtgtaacgacattattcgcgaagagattaaagaagttgccccgcatcgtgagcgcagtgcgctgccgacgccacacgaaattcgccaccacctggatgactacgtcatcggccaggagcaggcgaagaaagtgctggcggttgcggtgtacaaccactacaaacgcctgcgcaacggcgataccagcaacggtatcgagttgggcaagagcaacatcttgctgatcggcccgaccggcagcggcaagactctgctggcggaaacgctggcgcgcttcctggacgtgccgttcaccatggccgacgccaccacgctgaccgaagccggttacgtgggcgaggacgtggaaaatattatccagaagctgttgcaaaaatgtgactatgacgtgcagaaagcgcagcgcggcatcgtttatatcgatgaaatcgataagatttcccgtaagtctgacaatccgtcgatcacgcgtgacgtctcgggtgaaggcgtgcagcaggcgctgctgaagctgattgaaggcaccatcgccgcggttccaccgcagggcgggcgcaagcatccgcaacaggaattcctgcaggtcgatacttccaagatcctgtttatctgcggcggcgcatttgccggcctggataaggtgatcggtcaacgcgtcaacaccggctccggcatcggcttcggcgcgaccgtcaagggcgagtccgagaaggccaccgaaggcgaactgctgctgcaggccgaaccggaagatttgatcaagtttggtctgatccctgagtttatcggccgtctgccggtggtggcgaccctgagcgagctgagcgaggacgcgctgattcagatcctgaaagagccgaagaacgccctgaccaagcagtatcaggcgctgttcaatctggaaggcgtggagctggagttccgcgacgaagcgctgaacgccatcgccaagaaagccatggcgcgcaaaaccggcgcccggggcctgcgttccatcgtggaaggcgcgctgctcgacaccatgtacgatctgccgtcgatggacagcgtagacaaagtggtgatcgacgagtcggtgatcgccggccaatccaaaccgctgctgatttacggcaagcctgaagcccaggcgtctggcgaataattagccagttaaaccagcgcgttatcagcaaaatgggggatttcatcccccatttctttttcctgcattcttgccgttgaatgtaagagattcatccccatatactcattaaccagattttatgaaacgttagatgcttgcgtctcatgagattccccctcaacctggcggaaattaaactaagagagagctctatgaaccctgagcgttccgaacgcattgaaatccccgttttgccattgcgcgacgtggtggtttatccgcacatggtgatcccgttatttgttggccgggaaaaatcgattcggtgcctcgaagccgcaatggatcacgataagaagatcatgctggtggcacagaaagaggcctcaacggatgaacctggcattaacgacttgttctcggtcggcaccgtagcgtcgatcctgcagatgctgaagctgccggacggcacggtaaaagtgctggtcgaggggctgcagcgcgcacgcatcactacgctgtccgacagcggtgagcatttcgccgcgcaggcggaataccttgagtcgccggctatcgacgagcgcgagcaggaagtgctggtgcgcaccgcgatcaatcagtttgaaggctatatcaaactgaataaaaaaatcccgccggaggtgctgacgtcactcaacagcatcgacgacgccgcgcgcctggcggacaccatcgccgcccacatgccgctgaaactcagcgacaagcagtcggtgctcgagatgtccgacatcaccgagcgtctggaatacctgatggcgatgatggaatcggagatcgacctgctgcaggttgagaaacgcatccgtaaccgcgtcaagaagcagatggagaagagccagcgcgagtactatctgaatgagcagatgaaggcgattcagaaagaactgggcgagatggacgacgcgccggacgagcacgaagcgctgaagcgcaagatcgatgcggcgaaaatgccgaaagaggcgcgcgaaaaaaccgaagcggaactgcaaaagctgaagatgatgtcgccgatgtcggcggaagcgaccgtggtgcgcggctacatcgactggatgctgcaggtgccgtggaatgcgcgcagcaaggtgaaaaaagacctgaacaaggcgcaggaagtgctcgataccgatcactacggcctggagcgcgtgaaagatcgcatcctcgagtacctcgcggtacagagccgcgtcagcaaaattaaggggccgatcctgtgtctggtggggccgccgggcgtgggtaaaacctcgctggggcagtcgatcgccaaggcgaccggtcgccagtacgtgcgcatggcgctgggcggcgtgcgtgacgaagcggaaatccgcggtcaccgtcgtacctacatcggatcgatgccgggcaaactgatccagaagatggccaaggttggggtgaagaacccgctgttcctgctggatgagatcgacaagatgtcttccgacatgcgcggcgatccggcctccgctctgctggaggtgctggatccggaacagaacgtggcgttcaacgaccactacctggaagtggattacgatctgtccgacgtgatgtttgtcgccacctcgaactcgatgaacattcctgcgccgctgctggatcgtatggaagtaatccgcctgtcgggttataccgaggacgagaagctcaacatcgccaaacagcacctgctgccgaagcagctcgagcgcaatgcgctgaaaaaaggcgagttgacggtcgacgacagcgccatcatcggcattattcgcttctatacccgcgaagccggggtgcgcagcctggagcgtgaaatctccaaactgtgccgtaaagcggtgaaaacgctgctgatggacaagaagcgcaagcatatcgagatcaacggcgacaacctgaaggattacctgggcgtgcagcgcgtcgattacggccgtgcggataccgaaaaccgcgtgggcgaagtcaccgggctggcgtggacggaagtgggcggcgatttgctgaccatcgaaaccgcctgcgtgccgggcaaaggcaagctgacctacaccggttctctgggtgaagtgatgcaggaatcgattcaggcggcgctgaccgtggtgcgcgcgcgcgcggagaaattgggcatcaacgccgatttctacgagaaacgcgacatccacgtgcacgtgccggaaggggcgacgccgaaagacggcccgagcgccggtatcgcgatgtgcaccgcgctggtctcctgcctgaccggcaacccggtacgcgccgatgtggcgatgaccggcgagatcacgctgcgcggtcaggtgttgccgatcggcggcctgaaagagaagctgctggcggcgcatcgcggcggcatcaaaaccgtgctgatcccttacgagaacaagcgcgatctggaagagatcccggacaatgttatcgccgatctggagattcatccggtgcagcgaatcgatgaagttttgaacattgcgttgcaaaacccggccttcggcgcactgccggtagcggcaaaatagtgacgaatcgcaaaaaccattgataaaacttatactggcaagccatttcggacttgccagtatttttttgtaccgctaagttagatctctgtcggcccgcgttttgtcacccagtcggtggcttgccaaggttcgatgggattgatataacagctgcgctgtcgcaaccgtagggatttttcggtgcgacgatagaattctagaggggatgatagagtgaataagtcacaactgatcgacaagattgccgcaggtgctgatatttccaaagcggcagcgggacgtgctttagacgcagtaatcgcttccgttaccgactccctgaaagcaggggatgacgtggctctggtaggtttcggttcctttaccgtgcgtgaacgttcggcccgtaccggccgcaacccgcaaaccggtaaagagatcaagatcgcggcagccaaagtacctgccttccgtgcagggaaagcgctgaaagacgctgtaaactgatttagcgtctaaccgtttagcgtaacagggttttgtaataaacaatcacctgacgcagcggtgctggtaaggtaagatacaaggcgcatcggactgatgcgctttttttatttttgtcgcagggaacgcgcctgcgcaagggttgttaatccacatcacagcggagtgttgtcacactatgatggacaatttacgcgcggctgccaatcacgtcgtgctcaaaatcatcctggccctgatcatcctgtcattcgttctgaccggggtgggtaactacctgatcggcggctccggcgattatgctgcgaaagtaaatggtcagacgatcgaacgcgctcagctggaacaggctttccaaagtgagcgcagccgcatgcagcagcagctgggtgaccagttctctgcgctggccggcaacgaaggctacatgcagcagatgcgccgtcaggtgttgtcccagttgatcgacaacatgctgctcgaccagtatgccaagaagctgggcctggcggtcagcgacgatcagatcaaggacgccatccgcaaggcgccttacttccagaccaacggccagttcgataacgccaaatatctcgatctgattggccgcatgggctacaccgccgacaacttcgcgcagtcgatgcgtcagcagttggtcaatcagcaggtgatccaggccttcggcgagtccggtttcgtgctgccgtctgaatcgcaagccatggcggcgctggtgctgcaggagcgcgacgtgcgcctggcgaccatcgatttgaaagcgctgcaggcgaaacagagcgccggcgacgacgaactgaaggcgtattacgatcagaacaagaacagcttcatcgccccggagcaggtgaaggtgagctatatcccgctggacgccgcgtccatgcaggacaaggtgaaagtgagcgaagaggacatcaacgcttactacgaccagcacaagagcagctacggccagccggagcgtaaaaactacagcgtgatccagctgaaaaccgaggcggaagccaacgcggcgctggatgagctgaagaagggcgccgatttcgccaccctggcgaaagaaaaatccaccgacatcatctcacgccgcaccggcggcgagctgggttggctggagccggaaaccaccgccgacgaactgaagcaggctaacctgaccgagaaagggcagctgtctggcgtagtgaaatcctccgtcggctacctgatcgtgcgtttgaacgacatcgaacctgagaaactgaaaccgctgagcgaagtgcatgacgccatcgccaagcaggtgcagcaggagaaagcggtagacgcctattacgcgctgcagcagaaggtgagcgaagcggcgaccagcgacaacgaatctttggcctcggctgaggaagcggccggcgtgaaagcggcgcaaagcgactggttcacccgcgacaacatccctgccgcgctgaacttcaaaccggtggtgcaggcgatcttcgacggctcgctgatcggcgagaacggcgtgccgggcagcaactccgacgtgatcaccgtagacggcgaccgcgctttcgtggtgcgcgtgagcggccacaagccggaaggcatcgaaccgttcgaccaggtaaaagaccgcgtggcggaactggtgaaacgcaacaaggcgctgcaggcagcgaagctgcagggcgagaagctgctggttgagctgaagcagggcaagggcgacgaagcgatgaaagccgccggcctgagctttggcgccgtgcagaagatggcgcgcgcgccggaagacagccagctggtggagagcgtgttcgcgctgccgcacccgcaggacggcaagccggtgtacggcatgtcgcaggatcgtcaggacaacgtggtgctgattgcgcttgatgcggtgaagccaggcacgctgccggaagacgaaatgaaaaccttcgtcggcaagatggaagagggcgcgaccggcgtttccttcgattcgctgctggcgagcctgcgtaaagaagccaagatcaaaatgggcgccgctgagcaacagcctcagtaatcgccgcatttttctgcaacgcagtgcaacaaacaaaggccgctttcgcggccttttccatatctgacatctgtcgattgctgaatatccgccgccgcggcaaggtagccgtgctgtcacacacaaggaggatacagcatgcaatattcagagaaaaaagcgtttttcggttaccgtcgtcacgttaacgccgcgctgaccgcgctgttgttatgcctggccgggccggccgccgcggtggaaaaaaacgaggcgccgatgctctcaacaccggcgagccatggcggacaatcggtgatgaccaaggcaaccgaagaggcggcggtcagcatcaatcaggccactgccgaacaactggccgccgccttgagcggcgtcggcctgaagaaggcggaaggcatcgtgcgctatcgcgaacagaacgggccgttcacccaggttgagcagttgcaggaggtgccgggcatcgggccggcgctgtttgagaagaaccgcacccggctgaaaatgtgatcccggtcgcggctgcgtggcaaaatggcgctgaggccgtgactcctctgctacattttacaggtcttaccagtttggcgcgttgaccaaacgggcgagggagccagagcggctccctctttctgtaatcaccaggcaggagcgatcgttccctatgcaaacctttatcaaagttcgcggttatcaccttgatgtttaccagcacgttaacaacgcccgctatctggagtttctggaagaggcgcgttgggagtggttggagaacgaagccgggttccgctggatgacggaaaacaacatcgctttcatcgtggtgaacatcaatatcaattaccgcagcccggcggtattgggggataagctgcgtatcgacagccagatggtgcagctcaacggcaagagcggggtgctgagccaaaaggtgacgcaggatccggcggggacgccggtggcagacgcgctgctgactttcgtgtgcgtcgatctgaaaacgcagcgtgcgctgccgatcgaaggagaattgcgcgagcacctggaggcgctcacgctgaaggataatccgcagtaagctcacgggcggcataggctgccgccgtcactgccctcaggccaggccggctttctgcttcaacgccgccatcacttctgcctggttggcccggtactgcgtcaggccattggcgcgcaggttgcaggcggcgcactcgccgcagccgtcacccttgatgccgttgtagcaggtcagcgtatcctggcgtacgcgatccagctggtggtaataatccgccagcgcccaggtctcggccttgttcagccacatcagcggcgtttcgaagcggatatcgcgggcgatgcccagcgtcaccgccttgttcagcgctttaacgaactcgtcgcggcaatccgggtagccggagaaatcggtttcacacacgccggtgatcaccgcttccgcttcgacctggtaggcgtagatcgccgccagcgtcagaaacaggatgttgcggcccggtacgaaggtgctcggcagcgcatttttctggttgggatcgtaggtgggaaccggaatattgtcgcgcgtcaggctgctgacggccagctcattaagcagcgttacgtccagcaccttgtgcgccttggcgccgagggctaccgacagctcttgagccacctcaatctcggcgcgatggcgctggccgtaatcgaacgtgacgcagtgaacttcgtcatactgttgcaatgcctggattaagcaggtcgtggagtcttgtccaccgctgaaaacgacaaccgcgcgcttcataaaatcacctttttgggctttggcctctcccgatacacattcgggcggcaggataaaaattgcgttgcggcgacaatagtagcagaaagggccgccaggcgcagggcggttcggctcaggccggtgcgttgtccaccggcggcggcagccacgcctggcaaaaatcgaaccagccgtgggcggtcagcgtgacgccatgcatgcgcggcggcgcgctgatctgatactggtagtggaacagcggcgtgatgatggcggcggccatcagccgttgataataggcctgcaaccgtgcgaaacgcggttgctgcgcctgcagctgctggatctgccgcagcgtatcctgttgctgctgccagcggctttccgtcaggatgccgcgccacagcgtatcctgccgcagccagctctccagcgtcgcctccggcgcttcgccgatcaggttgtccgccagcagcagatcggcctgggcgatctgttcctcgctttgccagcgcttgccggcatagtaacgcacctccagctcgcagccgtgctgcgcgagcaaccgctgtagcgcggccgtcaccgtttccagctcgaccggcggccgatacagcagcgtcagccgggcgggcagggcgacgtcctcttcgacctgttggtgggggatgcgccagccgggcagcatttcatggctgggggtgatcacgctgttggggatcggcagatggctcagcaggccggactgctggatcagcatcagcagcttttgcccctgggcttcgttcagcacgccgtggcgcaggttcagcgccagataacaccagcccaggctcatgctgcgctgcaccggccgggcctgcgccaaatcgtcttgctggccgatggtgatgcgcaccggatgctggcaactggtgtaggtgccggcggtaggtaaatcgggggtgatccagtattcgatggtatccagatacggatgctgcagatgataaccggcgtgctgttccagccgcaccagctgcggctcattcagtgtcagcttgaacgggccggcgccgatggccggcagctccgggtgagtcatcaggcaaggcagctccgccagccggtgggccagccagtagtccggcaggtgcagatcgaactgaatgcacaacggatgcggcaggctgatgcgcgtgacgttggccaggctcggttggctgcgcggatggcgctgcagtttttccagcgtttgcagcagttggtggccggtcaacggttcgccgttgtgccagcgcagctggctgcgcagaaagaagcgccagcgcaggccgcgatcgctaatctgccaatggtgcgccagatcgggctgcggttccgggttaccggtcatcaggcgcgtcagtccggcgtgcagggtcgacaccagatgttgttcggcgcggccggtcaatgtgagcgggtcgagcgcttccagcgtgcggtaatagggaatacgcagcgtcgggctgccggcctgccattgcccgccgaggtgcgggctgagcagatcctgcaggtgctgcggatcgagctgcgccatctccagcgctccctgatgattgccctgttgcagcagctgttgaagcagctgtgcgcgcagttcatccggggttttcaggcagtgcaggcgagcgcgcttaccgcggccgggctgcgaataccagctcagccagccctgatcctgcagctgctgcaccagcgtgcgggcgtgccgctcgctgcagtagaacatcgccgccagctcgccgatggtcacggcgaccggcgcgctgccgagctgttgatacaggcgttgatattggctgagacggtgaaccaggcgcatgggcagaaatccggaacagttttctcaaattgttcactattacttccgcaaataccatcccatactgcagtgattgtaatcgcgttcacattcatgaggtctttatgtatcgcctggcagctttcgatatggacggcacgctgttgatgccggatcaccgggttggcccggaaacgctggcggtgctgaaccagctggtggagcgggagatggtggtgacgttcgccaccgggcgccactacctcgatgcgcaaccgatcatggcgcaactggggctgcagggttacctgatcaccggcaacggcacgcgggtatatgacaaccgtggccaacagctgcacgccaccgacctgccggcggcggtggccgaagaggtgctgcatcatcattggcgcacccgcgccagcatgcatgtattccgcgacgaaggttggctgaccgagtttcccgtgccggaagagatgctgcgggcgcatcacctgagcggttttcgttttcaactggccgatgtgcgccgtctgccggcgttcggcaacagcaaggtgtgctttgtcgcgccacatgaggagttgctggcgttgcaggtgcagctgcgggcgcaattgggcgatgaggcagacctgtgcttttccgcctacgactgtctggaggtgctgccggtcggttgcaacaaaggcacggcgctggagcggctgagccgtcatctggggctgacgatggccgactgcatggcgttcggcgacgcgatgaacgacaaagagatgctgggagcggtggggcacggcgtggtgatgggaaacgccctgccgcagctgaaatccctgctgccgcagctaccggttatcggccattgccaacaacaggcggtggctcactatttacaacattggctgcgttcaccttgcctcacctattcccccgaagaatgaggttctccttacagccggccgggtatgactacccggcttttttttacccgaagcctggcgttacaaatccgccagctgcgcgagatacggctgcagatcgccgatgttgttgctgacccattccgggttgtaataagtatccagataacgctcgccgctgtcgcacagcagggtaacgatcgacccttgctcgccgttttcccgcatctgcttcgccaactgcagcgcaccccaaacgttggtgccggtagaggcgccaaccttgcggcccagcacgccttccagccagtgaatggtggcgacgctggcggcatccggcacgcgcagcatgttgtcgaccaccgacgggatgaacgacggctcggcgcgcgggcggccgatgccttcgatacggctgccgcagctgccgatcagggtgcgatcgccgtggtggaagcagtcatagaacaccgagttttccggatcgaccaccgtcaattgggtgtcgtgcccctgatagcggatgtagcgccccagcgtggcagaggtgccgccggtgccggcgctcatcacgatgtgtttcggcaccgggaaaggttcgcgcgccatctggcggaagatgctgtcggcgatgttgttgttgccgcgccagtcggtggcgcgctcggcgtaggtgaactgatccatatagtggccgttcagctctttcgccagctgttcggaggcagcgtagatttgggcggcatgatcgacgaaatgacagcggccgccgtaaaaggcgatctgttccaccttgcggcgcgcggtgcaggacggcattaccgcgatgaacggcaggccgatcagacgggcgaagtaggcttcggacaccgcggtgctgccggacgaggcctcgatgatggtggtgttctcggtgatccagccgttgcacaggccataaaggaacagcgagcgcgccaggcggtgtttcaggctgccggtcgggtgggtgctctcgtctttcaggtacaggcagatgccgggaaacgccggcaggttcaggcgaatcaggtgcgtatcggcggagcgctgaaaatccgcttctatttcaccgatagcatattttacccaagagtttgtcatgatatggcctcagaatagggggctggtttatggcgtagcatagcctgtcggcgggaaaaaaggattgccattttccctgtttaatcgcctaatgggagaaaatttttctccgggtggccgctatgttagataaaacagaccgtaagctgctgtgcatgctgcagcaagattgcacccagtcgctgcaggcgctggccgatgcggttaatttgacctctacgccatgctggaagcgcctgaagcgtctggaagacgaaggctatatccgcggccgggtggccttgctggataatgaaaagctcggcctggggctgacggcgttcgtgctgatcaagacccagcagcacagcagcgagtggtatcaggcgtttgtgcagctgaccagccagatgcccgaggtgctggcgttctaccggatggcgggggagtacgactaccttatgcaggtcgaagtggcggacatgaaaagctacgacggcttttataagcgcctggtgaacggcgtaccgggccttattgacgtcacctcgagctttgccatggaaaaaatcaaatacaccactgcgctgccggtgccggagtgaaaagttaaccggacgggcggctcaacggtggtatcctgctctgctgaagcagaaaaagagacaaatcccataaaatcctggaatcaaactgcgtgagattatttgcacaaatcggctggtacttccgccgggagtggcgccgctacctcggggcggtggtgctgctgatcgtcatcgccatcctgcaactgttgccgcctaagctggtcggcatcatcgtggatggcgtcaccgaaaaacagatgtccaccggcgtgctgttggcctggctcgggctgatgatcggcaccgcgatagtcgtttacctgctgcgctatgtgtggcgggtgctgctgttcggcgcttcctaccagctggcggtcgaactgcgcgaaaacttttaccgccagctcagccgacaaaacccggcgttctacctgcgccatcgcaccggcgacctgatggcgcgcgccaccaacgatgtggatcgcgtggtgttcgccgccggtgaaggcgtgctgacgttggtggattcgctggtgatgggggtggtggtgctggtggtgatgagcacccaaatcagctggcagctgacggtgttggcgttaatcccgatgccgctgatggcgatcgccatcaaatattacggcgaccagctgcaccagcgctttaaatcggcgcaggcggcgttttccagcctgaacgatcaggcgcaggaaagcatgaccagcatccgcatgatcaaggccttcgggctggaagatcaccaatccaaccgtttcgccgacgtcgcggcgcagaccggggccaagaacatgcacgtggcgcgggtggatgcgcgcttcgatccgaccatttatatcgccatcggcgcctctaacctgttggctatcggcggcggcagctggatggtagtgaacggttcgctgacgctcgggcaactgaccagctttgtgatgtacctcggcctgatgatctggccaatgctggcgctggcctggatgttcaatatcgtcgagcgcggcagcgcggcctacagccgcatccgcagcctgctcgacgaggcgccggcggtgcaggatggcccgcaggcgttgccggccgggcgcggcgtgctggaggtggatatccgcgcgttccactacccggaaaacccgcatccggcgctgcacgatgtggcgctgacgctgaaaccagggcaaatgctggggctgtgcgggccgaccggggccggcaaatcgacgctgctgtcgctgatccagcgccagttcgacgtcgatcaagggcagatccgctatcacggcctgccgttgccgcaggtcaaactcgacgactggcgttcgcggctgtcggtggtgagccaaacgccgttcctgttctccgataccgtggcgaacaacatcgcgctgggccagccgggggcgacgcaggcgcagattgaacaggcggcgcggctggccagcgtccatgaggacattctgcggctgccgcagggctatgacaccgaggtgggcgaacgcggcgtgatgctgtcgggcgggcagaaacagcgcatctccatcgcgcgcgcgctgctgctggatgcggagatcctgatcctcgacgatgcgctatcggcggtggatggccgtaccgaacaccagatcctgcacaacctgcgtagctgggggcaagatcgcacggtgatcatcagcgcacaccggctgtcggcattaaccgaggccagcgaaatcctggtgatgcagcacggcggcgtggcgcagcgcggcgatccggcggcgctggcggcgcagccgggctggtatcgcgatatgtaccgctatcagcagctggaagcggcgctggacgaagcgccggaaaacggcgaggaggcgttggccgatgaataaagtgcaaaagctgtggccgacgctgaagcgcctgctggcctacggttcgccgtaccgcaaaccgctgggggtggcggtgctgatgctgtgggtggcggcggcggcggaagtcgccgggccgatcctggtgagctattttatcgataattacgtcgccaaagggcaactgccgctgatgatcgtcggcgggctggcggcggcctacattctgctggagctgctggcggcggcgctgcactacttccaggcgctgctgttcaaccaggcggcggtaggcgtggtgcagcggctgcgcaccgacgtgatggacgccgcgctgcgccagccgctcagcgccttcgacacgcaaccggtcgggcaattgatctcgcgcgtcaccaacgacaccgaagtgatcaaggacctgtacgtgatggtggtctccacggtgctgaaaagcgccgcgctgatcggcgccatgctggtggcgatgttcagcctcgactggcgcatggcgctggtggctatctgcatcttcccggcggtgttcgtggtgatgggcatctatcaatattacagcacgccgattgtgcgccgggtgcgcagttatctggcggacatcaacgacggcttcaacgaagtgatcaacggcatgggcgtgatccagcaattccgccagcaggtgcgcttcggcgagcgcatgagcgccgccagccagtcgcactatctcgcgcgcatgcagacgctgcggctcgacggtttcctgctgcggccgctgctcagcctgttttcggcgctggtgctgtgcggtttgctgatgttgttcggcttcagcggtgaaggcgtgattggcgtcggcgtactctatgccttcatcaactacctggggcgtttgaacgaaccgttgatcgagctgacgtcacaacagtcgatcctgcagcaggcggtggtggccggcgaacgcattttcgaactgatggatcgcagccagcagagttacggtaccgacgatagtccgttggccggcggccgcatcgacatcaccgatctgagcttcgcttaccgcgcggacaaaaaggtgctgcagcatatttctctgtcggtgccgtcgcgcggcttcgtggcgctggtcgggcacaccggcagcggcaagagcaccttggccaacctgctgatgggttattacccggtcagcgagggagaagtgcgtctcgatggccgcccgatctccagcttgtcgcaccgcacgctgcgccagggcgtggcgatggtgcagcaggatccggtggtgatcgccgattcggtgctggccaacgtcacgttggggcgcaatatcgaggaagacgccgtttggcgagcgctggaaacggtgcagctggcggatctggtgcgtggcttcccgcagggtattcacacccgactgggggagcagggcaataacctgtcggttgggcagaaacagctgctggcgatggcgcgggtcttggtgcaggcgccgcagatcctgatcctcgacgaggcgaccgccaatatcgactcgggcaccgagcaggctatccagcgggcgctgcgcgtgatccgcgagcacaccacgctggtggtgatcgctcaccgcctctcgaccatcgtcgatgccgattccattctggtgctgcatcgcggccaggcggtggagcagggcaaccatcagcagctgctggcgcagcaggggcgctactaccagatgtatcagctgcagctggcgggcgagcagttggcggaagcggtgcgcgaggagagccaacccgcctgatcccacgggccgcgatcgcggcccttatttttcccaacgcaccacaagcaggcaactccgccaggctacgccccctttctgcactttttcgacgcgacacgcaccaaatcagtgcgcattatttaacccattcaaggtatcggtactgcgccgcgccgcggcggcgcccgcgtgcccgctaatccgctgaatcgccatgcaaaataaaatttggcacagcccttgctacatatgacgcgtaccaggggtgagtttgggcttaattcgtggaggggcaatatgaagctggtgaccgtggtaatcaaaccgttcaagctggaggacgtgcgcgaggccttgtcctccgtgggtattcaggggttgaccgtaaccgaagtgaagggctttggccgccagaaggggcacgccgagctgtatcgcggcgccgaatataacgtcaatttcctgcccaaggtcaaaatcgatatcgccatcgccgacgatcagttggatgaagtggttgatgtgattagcaaagccgcctacacaggcaaaatcggcgacggcaaaattttcgttgccgagttgcaacgtgtgatccgcattcgcaccggcgaaaccgacgaatcggcactgtaaccgcgaactcagttaagtgatggggatggattgataatgaaaagactgttatccatgttgggcctgagttcggtaaccctggttccttctttggccctggccgccccggcggtcgctgataaggccgacaacgcctttatgatgatctgcaccgcgttggtgctgttcatgacgctgccgggcatcgcgctgttttacggtggcttgctgcgcggcaaaaacgtgctgtcgatgctgacgcaggtcaccgtcaccttcgcgctggtctgcgtgctgtgggtgttgtatggctatagcctggcgttcagcgagggcaatgcggtgttcggcgggttcgaaacggcgatgctgaaaggcatcggcatcgacagcgtcaccggcagcatcagccaaatgatccacgtcgccttccaggcctccttcgcctgtatcaccgtggcgctggtggtgggtggcttcgccgaacgcattcgcttctcggcggtgctgatcttcgcgatcctctggttcacgctgtcttatctgccgatcgcgcacatggtgtggggcggcggttacctggccgccgacggcgccttggacttcgccggcggcaccgtggtgcacatcaacgccgccagcgccgggttgatcggcgcctacctgattggcaagcgcgccggcttcggtaaagaggccttcaaaccgcacaacctgccgatggtgtttaccggggcgtccatcctgtatatcggctggttcggcttcaatgccggttccgccagcgcggccaacggcattgcggctctggcattcctcaacaccgtggttgccactgcgggcgccattctctcctggaccttcgccgagtgggtgctgcgcggcaagccttcattgctgggcgcctgctccggcatgatcgccgggctggtagcagtgacgccggcggcgggcaccgtgggcgtgggcggggcgttgatcatcggtctggtgggcggcgtcgccggcctgtggggcgtcgtgacgctgaaaaaatggctgaaagtggacgacacctgcgacgtgttcggtgtgcacggggtgtgcggcatcgtcggctgcctgttgaccggggtgttcaccgcctcttcactgggcggcaccggttacgccgaaggggtgacgatgggccatcaggtctggatccaactggtgagcgtgctgatcacgctggtgtggtcgagcgtcgccgcctttatcgccttcaagatcgcgggcgccatggttggattgagagtgccggaggagcaggaacgcgaggggctggacgtcaacagccacggcgagagcgcctacaaccagtaaggctcaaagcagggcagtgcgctaaagactaaaataatgatgaagccaaaaggggcgatggaaacatcgcccctttctttatactgcggatcaggcgtcgcgttggcgaatcaccccttcctgcacggtggtggcgaccagtacgccgtcgcgggtataaatctggccgcgtacaaagccccgtgcgccggaggcagaggagctctccaccgcgtacagcagccagtcatccatgcggaacggacggtggaaccacattgagtggtcaatggtagccacctgcatgcccggctcgaggaagccgacgccgtgcggctgcagcgccgtcggcaggaagttaaagtccgacgcgtagcccagcagatattggtggatgcgctgatcgtccggcatgctgccgttggcgcggaaccacacgtagcgatgcggttcttccacgctgcctttcagcgggttatggaatttcaccgggcgcatttcgatcggcttctggccgataaatttttcgcgcactttttccggcagcatatgcgccagcttctgggcgatctctgactcagacagcagcccttccggcggcggcacgtccggcatctggttctggtgctcgaaaccttcttccgggctctggaaggaggcggtcatatagaagataggtttgccgtgctggatggcgctgacgcgacgggcgctgaagctgttgccgtcgcgcagggtttccacgtcgtaaacgataggcttgctgctgtcgcccgggcgcaggaagtaactgtggaacgaatgcacgctgcgttcgtccggcaccgtctgtttggcggcgtacaacgcctggccgaccacctgcccgccgaacacctggcgcagccccagatcttcactctgaccgcggaacaacccttcttcgattttctccagatccagcagatcgaggaggttttgcaatgcctggctcataaagttgttacctttctaataatcattttgcgcagtgtgcggaatatcacggcgcggcgtcaacattttgcgttaaggggccgatgagaatgctcttaatcatggacgccttgggctgtttaagtgattaataggcggggtaaagtggatttatcagtgttttgtgctaggtttaataggtgaggtggtgaaagccaccaacatgttgataataaaaaaggagaccgatccatgaaactctggcaaatcgtaggcggtgccgcggcactgacgatcacgctggcaggatgcgcgcaaaagagtgccgatgtgcctacacagacggccggtaacccggcggctgcgcaaacgcagattcagggcccggcggtgacaggttcggttaatatacgtcagcgcattgcgctgccgccggacgccgtactgacggtcaccctctctgacgcttcgctggcagatgcgccgtccaaagtgattgcacagcgcgcggtgcgtactgaaggacagcaggcgccattcagctttacgctgccgtacaacccgtccgacatccaaccgaatgcgcgcatcattctgagcgcagcggtgacggtcaacgggcgcctgatgttcattaccgacaccatccaggaagtggttaaccgcaacggcacccgcgccgatctgctgctggttccggtgcagggcgtgccgatgcaggctgcgccaaccgccatgcagtaaacttactgcggtacagcaagatgaaatcaacagcctttgcgcttcggccaaaggctgttttgttttaccagcgccagccgtagcgttcgaaatcgaccgtgctgtgcgggccgaaaattatcccctccgctagcagtgcctgccgttgccgttgaaaatcctccccctgctgcgagatctgtccgtggcggttgatcacccggtgccagggcagcgtgctgccttccggcaaacgccgcagcacgccgccaacctgacgcgcggcgcgcggcgagccggccagccgggcgacttcaccgtaagtggtgactttgccgtaaggaatggcggccacgatatggaaaacccgctggctgaaagaggcgtcttctggttgcatattgctgttcctgcgcgaatcaaaatccaggcgaagagtgtgccacaatgcaggtgggcaagaaaacagcggttggccccggttggcttgctatttggtggggcatcgccgataatgcccaccgcttcggagtacagaagccgtcaatgggggccctgttggttctcccgcaacactaacttgtgaactcggtcaggtccggaaggaagcagccgcagcaggtgacgtgtgtgccgggatgtagctggcagggtccccacccatttgggcttcgccaatccgcgcttttgccacctctcctccacgtatctattatccatttctgtcatcaggcagagcgacacgcatttcttttcttcccgccttcaattcttttggataatgaattagcggttctggggagcgggcacagtgaggcgggcgatgagataacctgtctcgattaaaaaagaaaattgtttccgcgcaatattattatcggaagagggaacgcaagtgaagttttactgtcaataggaaaagtacgtattcaacttgaacattgaagccgataaaagcatcggctcaacgcgttgggggctgattatctgacatatttccaaacggaggtggggattttgtcatacagtttgttcatggtgagctctgccagacgatgatctgccgctgagtaaaacagctccagttcatcatcggaaagctcgtacttatttttctcaataacacgttcgagagtatcaatcgtggtgcatttacgtaaacgcatcagatagtcggttttagtcatggtggcctttagtttaataaccgtaaaatagcttgggaataattatcccctaagttttcattgtcgtacagatgtcctctcctgagaacattctgaataatctcgccttggttttttgccagcggcgcaggtcggaatcattgataccatagctgctgaacagcgtataggtatcgtcgagatattcttcgactaactccgacaggtcagattcgtccatgtatttaattttataactcatcacaaacgaagcgatatgttcgatcaactcattaagctgcaggttgacggaggacgtcggatcgttgacccacccatgatgactgtctcccagggtagcgataccttcatcatacaaattttcgcacaagaatttgagctgagcaatgtcgtgtcgcttaggcgaatactcatccatatcatcccctccgtaagtcttaattgcggtgtgataacactatgtgagtaagctgatttacatcatgaacggaggcagcttaacggtggttaaataaacttcccgtaaaatgaatataaatcattttttcgcgtttggcctgtagttattacttaaacttacaattcatccgcagttgatggtcgtgagttatcaatgatgtcgaagattaaaccccgcgccgtcactcgaaaccggacgctgtcgttgatgatatcttcgctgttgatatccaggcaggcattaaaaatgccccacttataacgataactcattgaataatcgctgtcaccttgttgcactatatcaagtatttctaatgaatcttcggcatagcgtgcgctttcagaataaaagctgagtccgctggtcagcgccggcactaactccgcaatattgtcatgaaccactttctttaattttttaacagaaagtgcgttgacgtccaggttacaggcaagggtaacaagcattaatctcggccaacaacaatgttatctgcttatcttactccttttccgccctcgtcggtaaatttttcgatttaccgctgttctttaccttacgccaacattccaaccgaatggaaatatccctgggttttgtaagggggcggggggagatccgctgtgcgagggattgttacgttccgttgcattattgtcgcgccatagcttgagctacggcagttgttgtgatgttatattataactattatccatcattttggtcatcacattgattcccacttcacgacatggcgccgcgtcgtcactgaattcgttgttcaccacctccgccgccgcgcgttgtgcgggggccgttgtgctgctggctctgctgtggctcggcatcttttgggcggtatcgctgccatgatcatcctgcgtcagctgatgctaggctatggcgccacgccgcttttcccgccgctgagcgggcagtttaccgccggctcgttaaccgcggtggtgggcgtcaatggggccggaaaatcgacattgctgaaaacgctcgccggtttgttgccgccgatgggcggcagcctgaatttcagtggcggaaagccgccgcgcagagcttacttaccgcagcaggcggagctggatcggcagttcccgatcgcggtaagcgatctggtggcgatgggatgttggccgcaaagcggcatgttcggcggtatgaaccagcatgcggcgagccaggttaatgaggcgctggcgagcgtcggcatgagtgtgctggcgcacagcccggtgggcgagctctccggcggccagctgcagcgggtgttgtttgcgcgcctgctggtccaacaggcgccgctgatcctgctggatgaaccttttaccggcatcgacagcgccaccacgcaaattttgctgcaggtgattgcgcagctgcaccggcaggggagaacggtgatcgccgtgctgcacgatatgtcgatggttgccgagcattttccgcaggcgctgttgctgacgccgcaggcttgccactggggcgcggccgagcgggtgctggagcaggtgccgaggtatcacgccgccgaacggcagccggatctgcgggcggtggtgccatgatgctgtggcatgcgcttatcgatcctttcctctctttcggttttatgcgccgcgcgctcatggcgtgcctggcgttgtcgctcagcgccgccccgctgggcgtgtttctgctgctgcgccgcatgagtctggtaggggatgcattgtcccacgcggtgttgcccggcgcggcgatcggctatctgatgtccggcatgtcgctggtggcgatgggcgtgggtggctttatcgccgggctggcggtagcgatgctgtccggcctggtgagccgccgcacgccgctgaaagaggacgccagcttcgccggattctatctgggctcactggcgctgggggtcacgctggtctcgttgcgtggttccagcgtggatctgctgcacgtgttgttcggttcgatcctggcggtggatgcgcaggcgatgctgatggtcggtgctatcgcctcggtttcgctgctggcgctggcggcgctgtaccgcgcgctggttatcgaatccttcgacgtcactttcctgcgcgttaacgcgccgcgccggttggcgctgatccacggcctgtttttggcgctggtggtggtcaatctggtggcgggattccagatcctcggcaccctgatgtcggttgggttaatgatgttgcccgccgccagcgcgcgcttctgggcacgcaatctgccgcagacgctggcgacggcgatgggcatcggcgcgctttccagtctgattgggctggtgtggtcctatcacgcttcgcttcccgccggcccggcgatcgtgctcagcgccagcatcctcttttttgtctcgatcctgtttggaacgcgcggaggcatttacgcctttgcgcgccgttgagaagtgccatttgcaaggagaaaatatgaaacgtttacctatatcgctggcggtagctgctctgctggccagcccattggcgatggcgaagaccgtcgacgccgtcgccagcttttccattttaggggatatcgtcaagcaggtggggggcgatcacgtcaaggtcagcacgctggtggggccggatggcgatccgcacagcttcgagccttcgccgcaggacggcaaaaagctggcgcaggccgatgtggtgttcgtcagcggcctggggctggaaggatggatcgatcgtctggtcggggcatcgggctataaagggcaggtgatcaccgcttcacagggcatcaatacccgccagatggaggaggacggcaaaccgattaccgatccccatgcctggaacagcatgaaaaacggcgtgcagtacgccaccaatgtgatgaacgccctgattgccgccgatcccgaggacgccaactatttccgccagcgcggcgcggaatacattcagcagctgcaaaagctggacctgtgggccaaaaaccagttcgccgcagtgccgccgcagaaacgcaaggtgctgaccagccatgatgcctttggctactttggacaagagtatggcgtcaccttcctcgccccggtcggattttccaccgaagcggaagccagtgccagcgacgtggcgagcctgattaagcagattaaacaggagaaggttaacgcttactttatcgaaaaccagaccgatccgcggctggtgaagcagattgccgccgccaccggcgccaaggcgggcggcgagcagtaccctgaagcgctctcccgcgccggtggtccggcggccacctatgagcaggcgttcaaacacaatgtcgacacgttgctgagcagcatgaagtaatctctgccccccgcccgcgggtgggggacagcttgcaggcactttctcgccataaaaaaagccccgttgagcagcaacggggctttgcgacagatgacacttgggagttaacgctttttcttacgtccctgtaccgctttgaatcgcggattgcttttacagatcacatagatgcggccacgacgacgcacgactttgcaatccggatggcgatttttcgccgaacgcaatgaactcaatacctgcatggggtttccttgttacttattgccgataaagcggccaaagcgctgctggaagcgcgccgtgctgccttctttggaatagtctttctgcttaccggtgtaatacggatgcgaagcggaagagacgtcgagggtgacatacggccagctttcgccgtccagttcgatagtgcgatcggttttgatggtcgatcccactttgaagtaggcattggcgctgacgtcgtggaacaccacggtgcgataatcgggatggatgccgggtttcataatggctctctctctcgtgtaatgttatactataacaataattatgcgccgacctggcatcatgatcaagcgtaaattgcactcacgagcgaattaatgagaacggtttgcattaatctgctgaaacaaaagaaaaaggccgcatgcgcggccttttcgattatcgggtggagctcacatcactgagcgatcagtggtgctctaccgggtggctgtgttccaggtcttcgttcttcttgctgaagcggcggcgaaccaccacgaagaacaccggtacgaagaagatcgccaatacggtcgcggtgatcatcccgcccattacgccggtacctaccgcgttctgtgcgccggagcctgcgccgctgctgataaccagcggcagaaccccgaggatgaaggccagggacgtcatcaggattggacgcagacgcatacgcactgcttccaatgtcgcctcgatcaggcctttgccttctttttccatcaggtctttggcgaattccacgatcaggatggcgttcttcgccgatagaccaatggtggtcagcaaccctacctggaagtacacgtcgttgttcatgccgcgcatcgtcgcggccaacaacgcaccgataacccccagcggcaataccagcatgaccgagaacggcacggaccagctttcatacagcgccgccagacacaagaacaccaccagaatcgagatggcgtacagcgccggcgcctggttgcccgacagacgttcctgataggacatgccggtccagtcgtaaccgatgccgcttggcagtttggacgccagttgctccatcaggttcatcgcttcaccggtactcttgcccggtgcggcctggcccagaatttccatcgacggcaagccgttatagcgttccagacgcggtgagccgtattcccatttcgccgaagagaaggcggagaatggcaccatctggccgctggtaccgcgcacataccacttgttgatgtcttccggcagcatgcggaacggcgcttcggcctgtacgtacaccttcttcacacgaccgcggtcgatgaagtcgttgacgtacgagccacccagcgcggtgctcagcgtgctgttaatggtggtgatgctcacgcccaacgccttggctttctcctgatcgacgatcagtttgaactgcggcgtatcttccaggccgttcgggcgcacgcccaccagcacatccggatgctgagcaaccatgcccaacagctggttacgcgcttcggtcagtttttcgtgccccaggccgccctggtcaatcagctcgaagtcgaagccggttgcggtaccgagttcgataatcgccggcaggttgaacgggaacaccaggccttctttaatctgcgagaaggcgcccatggcgcgaccggcgatcgcttcgaccttgttcccggcccccggacgctcgccccagtctttcaggctgacgaatgccaggccgttgttctggccgttaccgttgaagccgaagcccgcgacggtaaacaccgaaaccacgttgtccttttccttgttcaggaagtagtcagagacttcttccagcactttgttggtgcgggactcggtggcgccggcaggcaactgcaccatggtcaacaggatgccctgatcttcgtccggcaggaacgaggaaggcaggcgcaggaacagcaggcccatgccaaccacgatcagcaggtagatgatcagatagcggccggtgctgcgcaggatgttgcccacgctgtcggtatagtgatgcgtgcttttctcgaacatgcggttaaaccagccgaagaagcctgttttaaccccgtgatcgcctttcgggatcggtttgagcatggtggcgcacagcgccggcgtcaggatcaaggccaccagcaccgacagcgccatcgcggacacgatggtgatcgagaactggcgatagatggcgccggttgagccgccaaagaacgccatcggcacgaataccgctgacagcaccatggcgatgcccaccagcgcgccctggatctggcccatcgatttacgggtggcttctttcggcggcagcccctcttcggacatgacgcgctcgacgttttccaccaccacgatggcgtcatctaccagcaggccgatcgccaacaccatgccgaacatcgtcagggtgtttatcgagaagccgaacgccgcgagtatcgcaaaggtccccaacagtactaccggcaccgcgatggttgggatcagcgtcgcgcggaagttctgcaggaacagatacatcaccaggaacaccaggatgatggcttcgatcagcgttttcaccacttcgttgatggagattttaacgaacggggtggtgtcgtacggataaaccactttcatcccttgcgggaagaatggcgccatcttggccagctcgtctttcacacctttggcggtgttcaaggcgttggcgccggttgccagtttgatacccaggccggcggcaggcttgccgttataacgtgcggtaacggcataactttccgcgccgcgctcgatgtgagcgacgtcgcgcaggcgcacctgggaaccgtcggtattcaccttcagcaggatcttgccgaactcttccggcgaagtcagacgggtctgcgcgatgatcgaggcgttcaactgctgccccggcaccggcggcaggccgcccagctggccagcggcgatctggttgttctgctcggtgatggcggaggtcacgtccgtggtcgtcagctggtagttgttcagcttgttcggatccagccagatacgcatcgcgtactgggcaccgaacagctgcacttcacccacgccggacgaacggctgatcggatccttgatgttggacgccacgtagtccgcaatatcgtcctgcgtcatgttcggatcgtcggaaacgaagccggccaccatcaggaagctgctgctggatttttctactttcaggccctgttgctgaacttcttgcggcagcagcggggtggccaacgacagtttgttctgaacctgaacctgcgcgatgtcaggatcggtgccggattcaaacgtcagggtaatggtgacgctaccagaggaatcactggtggaggacatgtacatcaggttatcgataccgttcatgttctgttcgataatctgtgtgacggtatcctgcaccgttttggcatctgcgcccgggtagttggcggaaatactcaccgccggcggtgcaatagtgggatactgcgcgatgggcagtttcattattgcaagcacccccgccaacatgacgatgatggcgattacccaggcgaaaattgggcggtctataaagaacttagccatgtattacaggctcctttttatgacttctgcgcttcagactgcggctgtttttgcgcctgagtgtcaacttcctgcacttttacctgcgcgcccggatgcactttcatcaggccggagacgatcacgcgatcgccggctttcaggccatcggtaaccagccatttgtcgccaatcgcctggtccgccttcagcgtgcgcagctcaactttgttgtctgcccctaccaccaacgccgtcgcgtcgccgcgcgggttgcgggtgacgccctgttgaggcaccagcaacgcatcgctgcgtacgccttcgtccagacgggcgcgcacgaacatgccaggcaacagcgtatcgttcgggttagggaacagggcgcgaatggtaatggagccggtggtctcatcgacggtgacgtcagagaattccagcgtgccttcctgcgcatattcggtgccgttttccagcatcagtttcaccttggccttgccgttttcctgcttcagcgcgccgctggccagttcttgcttcaggcgcaggaagtcggtgctcgactgggtgacgtcgacatacatcggatccagctgctgcacggtggacagggcggtcgcctggccgttgctgaccagcgcgccttcggtcacggcagatttgccgatgcggccggagatcggggaggtcactttggtgtacgccagattaatgcgcgcggtttccacggcggccttggcggccaccacggcggcatccgcttgctgcagtgtggagacggcgttgtcgtagtcctgcttactgatatagctggtacccagcaatggcttgtagcggtttaccgtcacgcgtgcgatggaagcgctggcctgtgctttggccaaatcgcctttcgcgctgtcgtagctggcttgataggttgcgggatcgatttggtacagagacgtcccggccttgatatcgctgccttcgacgaagttgcgcttcaggatgatgccactgacctgagggcgaacttcggcgatacgatacgcagcggtgcggccaggaagatcggtagtgatgttgagaggctcggccttcaaggtgactacgcccacttcaggtgcctgttgttgggcaccttgctgttgggtttctttatcgttacatcctgttagcactaagctgcctgaaagcatcagaacggccgccagaggcgttaaccctctgtttttgttcatagaaaaacctcaagtgtccgatttcaaaatgatcaatggatcacaagctttaaaacccattgctgcgttaattatatgtgcgtgctatggtacatacattcgcgaatgtatgtaaatcacactccccctaaataacaatgccatggcacgaaaaaccaaacagcaggcgcaagaaacccgacagcaaatcctcgatgctgcggtgagagagttctctgaacgtggcgttgctgcaacgtcactgacagatattgccaccgctgctggggttacgcgtggagccatttactggcacttcaagaataaggtagacctgtttaatgaagtttgggaatctaccgagccgaaaattgaccagctcgaaacagagtatcaggcaaagtttcccgataatccactgcgggttatccgggaaattctgatttacgttctgacgtctacggttgaagacggccgcaggcgggcgttgatggaaattatattccacaaatgcgagtttgtcggtgaaatgatgccgctgctggattcgcgcaaggtgctgtacctcgccggttacgaacgcatcgaagcggtgctgtacaactgcattcaccacgggcaattgccggccgatctgcacactcgtcgcgcggcgatcatcctgcgcggttatatcaccggcctgctggaaaactggctgtttatgccggaaagtttcgatttgcgggccgaagccgaagcgctggtggatgcgtttttggagatgctgcagttttgccccaccttgcgcctcagatccgatatgccgacggcagcaccgcccaacgccggctccctgcctttataaggagagatttcatgtcatcagtcgttctcatcgccaatggcgccgcctatggccacgaatccttgttcaatgcgctgcggttggccatcgccatgaaagagcagcagagcagtctcgatctgcggctgtttctgatgtccgatgcggtggtggccgggttggccgggcagcagccgcacgaggggtaccacctgcagcagatgctggaaatcctcaccgcgcagcaggtgccggtcaagctgtgcaagacctgcgccgacgcgcgcggcgtcagccgcttgccgctggcggacggcgtggcgatcggcacgctggtcgagctggcgcagtggacgctggcggcggagaaagtgctgactttctgatttcgcgacaatgggacatcaccggcaacgcttttgttgttcgttgcctgccggctgtcgtgataatcttcaggcttcttaaccgattccgaagctaaatcatgcatcgctggttgactctgccctctctggcgccgcgctcgtttgtcggcgcatgccggcggcgcatcgccgccgcgacacttcttttcctgatttgcgcgctgagcttgccgacacaggcggcgctgaacggcgatctgccgcagcgcagcgaagtgcaaagccagctggaaacgctgagcaagcaaaaagccctgacgccggtcgaaaagctgtcccaacaggatttaacccgcacgctggagctgctggacgccctcgagcgcaaccggcaagacgccgcgcagcttaaacagcaggtgcagcaggcgccggcgaagctcaatcaggtcactgccgaactggatgcgctgaagcagccggtggacaatgcggcggcgcgcgctgcgctgttgccgttgtcgctgcgccagttggaaagccggctgtatcaaacgctcgacgagctgcaaagcgcgcaggagagcctctccacctacaacagccaactggtgtcgctgcaaacccagcccgagcgggtacaaagcaccatgtacgccgcctcgcagcgcctgcaggagatccgcagccagctcagcggccagacgccggggcaagattcgctgcgcaacagtcaacaggtgatgctgagcaccgagcaggcgctgctcaatgcgcagctggagctgcagcgcaagagcctggaagccaataccacgctgcaggatctgctgcaaaagcagcgcgactacaccacggcgcatatcgacgcgctggataagtcagtgcagttgctgcaggagatcgtcaacagcaagcggttgacgctgtctgaaaagaccgccaaagaggcgcagaacccggaagacgccaccgatatccagcacgatcagctggtcagcaagcagctggacgtcaaccgccagctgagccagcggctgattgccgccaccgaagagagcaacaccctgttccagcagaatattcgggtcaaaaactggctcgatcgcgggctgcaggcggagcgtaacctgaaagagcagatccaggtgctgaagggcagcctggtgctgtcgcgcatcctgtatcagcagcagcagagcctgccgcagggcacgctgttggcggatatggacacgcgcatcgccgatttgcggctggagcagttcgatatcaatcagcaacgcgacgatctgttcaagggggaggattacatcaaccagctggtggccgaaagcaaggaaaaggccggcccggaagtgatcgacgcgttgaacgagatcgtcgacatgcgccgcgagctgttggatcagctgaacaaacagctcagcaaccagctgtcgctgtcgatcaacctgcagatcaatcagcagcagctgaccagcgtctacggttcgttgcaggatacgctgacccagcagatcttctgggtcaacagcaacaagccggtcgatctggcgtggctgaaggcgatgccagaggcggtgcgcgatcagcttgccgggctagatatcaaattcgacggcggcaagctggtgcagggcgggttgaatgcgctggtgttcctgatcccgatgctgttggcgatcggggtattgcgctggcgctaccggctgatcgacggccatttacaaaagctggccagcgatgtggggcaactgaagcgcgacggccaactgcatacgccgaaggctatcgcgctgaccttgctgaaggtattgcccggcgccgcgctgctgctcggcgtcggtttctggatgtatcgcgccgatttcggcatcagcgactttatctgggcattgtcgcagcagctggcgctgtcgtggctggtgttcggcttcagctatcggatgctgaaaccgggcggcattgccgagcggcatttcaacttcggcgccaatctgtgcgcgcattaccgccggcagacgctgcggctgggattggcgctgcagccgctgatcttctggtcggtattgggcgaaaaagcgccgctgcgcctggtggaagacgttatcggccagatcgtggtgatgctgacgctggcgctgctcgcggtgctggtgttcccgctgtgtcgcgacagctggcgcgaaaagggctcgcacgccgtgcggctgatggtggttactgccatagccgccacgccgctgatcctgctggggctgatgttcgccggttacttctataccacgctgcgactggccagccgctggatagacagcctgtatctgtttttcctgtggaatatcgtgtacctgaccgcgctgcgtggcctgagcgtggcggcgcggcgtctggcctaccggcgcgcgttggcgcggcggcaaaacgtggcgaaagaaggagccgaaggcggtgaaccggtggtggaagagccgccgctggcgctcgatcagatcaaccagcagtcgctgcgcctgaccaccctggtgctgttcgccatcttcgccagcgccttctatgccatttggtcggatctggtgacggtcatcgcttatctggacagcatcacgctgtggcattacaccagtaccgtggcgggcagcagcgtgtcgcaggcggtgacgctgggcaacatgatggtggcgatcgccgcagtgatcgtcgcctacgtgctcacccgcaacttgcctggtctgctggaggtggtggtgctgtcgcggctgcagctgcggcagggggcgtcttacgccatcaccaccgtgctcacttacctgattaccgccgtgggcgccgtggttgcgctgggatcgctcggcgtctcctgggacaaactgcaatggctggccgccggtctgacggtcgggctgggcttcgggttgcaggagatcttcgccaacttcgtctccggcctgatcattctgttcgaacgcccgatccgcatcggcgataccatcaccatcggcaccttctccggttcggtcagcaagatccgcattcgcgccaccaccattaccgacttcgatcgcaaagaggtgatcattccgaacaaggcgttcgtcactgagcggctgatcaactggtcgctgtccgacaccatcactcgcgtgctgatcaaggtcggcgtggcctacggctccgatctcgacaaggtgaaaaaggtgctgctgcaggcggcgcacgacaacccgcgggtgatgaccgatcccgaaccgcaggtgtttttcctcaacttcggcgccagcacgctggatcacgaactgcggctctatgtgcgcgaactgcgcgatcgcagctacacggtggacgaactgaatcgctcaatcgaccgcttgtgccgggaaaacggcatcgacatcgccttcaaccagctggaggtgtatctgcataaccagcagggcaacgaagtgcaggaagtgaaaagaacgctgtcgccggacgacggcggccagacggcgggctgatgaacgttgaaggacgaaagggacagcggcgctgtccccgattactgtccggcgggcagatagggcgaggtgacgccggcgcgctgcagcttttcctgataatcccgtttgacgatatccagcgccgccagtgcggtgaccggatcgatctcgttgcattccagcaggtaaatcaagtctaccgccagctgcagttcgggtgaggcgttttccagagacatagcacctgcgcttattaattaatgggatgaataactcgcgtaccggcagagtatagtgaacccggcgcgcaaccgggaataatcattaaaatattgtgataaatcttcaaaaaccgttttctttgcgctcgatattgcgctcgatgcgcgccaacgcctgacgacagcgcatcagccgcccctccagcgccgccagctcgtgctgcagtttttgctgcgccgccagcgtggtttggcggccgagcaggctttcccgatcctgaatcatggcgatcagccggcgttcgtagtcctgatgttcggccagcttgtggtacagatcggcctcgggggcttctttcggctggttcttgcgccgcagcgcctgggtcgccagctcgcgctgcagggcggcgatctgagccaccagtttttcggccagaaaggccacctggctggtgcggttgtcgttggcggcgctttgcagctgggcgaaattcttctccacctcggccaggtagtcgcgcagccgcgtgccgcgattggcgaacagggcggcgtcgaagcgcgcctgcgggatcggaacgtcgccgcgcggggtcacttcggccgccagcgccgcgatctgctgtgccaacacctgtaatagacgctgagtgctcacataagctccctcttgatttcaacaggcgtaagcttgcccgcgatgctgctgtgaaacaagcgccgcatgcatattccgccggcgcggcgccgatgctacagtaagccgcaaccggttgaggagcgaagagccgcatgacgcgtgggttattgatcattttgggctggctggcggtggtgctggcgacgttgggcgtggtgctgccgctgctgccgaccacgccgttcctactgttggccgcctggtgtttcgcccgctcttcgccgcgctttcatcactggctgctgcaccgttcctggttcggcccttacctgcgccactggcagcagcatcgcgcgctgccgccgggggcgaagtggaaggcggtgctggtgatcgtgctgaccttcgcctgttcgctgtggctggtgaaaatctggtgggtgcgcgggctgttgctgctgatgctggccattttgctgacttttatgctgcgtctgccggttattgacctgccgcaacaaaaacagcgctgattgtgcgccgctggttgcatttgtccgccagtttgcatagatttgggcgttttcgtgcgcggatcgcctgccatttcttctccggtgtgtttctcccgggggcggcgggtgagcggcgcgccggttttcaggcagttttatcaggcaacaattatgaccgctactgcgcagcagcttcagtttattaaagacagtatcaaaaccatcccggattatccgaagccgggcatcctgttccgcgacgtgaccagcctgctggaaaacccgttggcctatgccgccagcatcgagctgctggttgagcgctatcgcgaagcgggcgtgaccaaggtggtgggtaccgaagcgcgtggtttcctgttcggcgcgcccgtcgcgctggcgctgggcgtcggtttcgtgccggtgcgcaaaccgggcaaactgccgcgcgccacgctcagcgaaagctatgagctggagtacggcaccgacaagctggagatccacaccgatgccatcaccgcgggtgacaaagtgctggtggtggacgatctgctggcgaccggcggcaccatcgaagcgaccaccaaactgatccgccgcctgggcggtgaagtgaacgatgccgcgttcatcatcaacctgccggatctgggcggggaagcgcgtctgaacaagctgggcatcgattgctactgcctggtggatttcgccggtcattgatgcggcatcgcccctcgggcacaacggcctcgcggatcgccgcggggctgtgttagcatgaccctccagattcctcgacttctccggtattaatgagctatcaggttctcgcccgtaagtggcgccctcaaacgttcgcagacgtggtcggccaggaacatgtcctgaccgcgctggccaacggcctctcactggggcggatccatcacgcctatctgttctcgggcacgcgcggcgtgggaaaaaccaccatcgcccgcttgctggccaaaggcctgaactgtgaaaccggcatcaccgccacgccatgtggccaatgcgacaactgccgcgagatcgagcaggggcgctttgtcgatctgatcgagatcgacgccgcttcccgaaccaaggtggaagatacccgcgatctgctggacaacgtccagtacgcgccggcgcgcggccgcttcaaggtctacctgatcgacgaagtgcacatgctctcgcgccacagcttcaacgcgttgctgaagacgctggaagagccgccgccgcacgtcaaattcctgttagccaccaccgatccgcaaaagctgccggtgaccattctctcgcgctgtctgcagttccacctcaaagcgctggacgtcgatcagatccgtcagcagctggaaacggtgctgacggcggagcagatcaccagcgacgcccgcgcgctgcagctgctggcgcgcgccgccgatggcagcatgcgcgacgcgctgagcctgaccgatcaggcgatcgccatggggcaggggcaggtgaccgccgctaccgtcagccagatgctcggcacgctcgatgacgagcagccgctggcgatcctcgaagcgctggtcagcgccgacggcgaaaaggtgatggcgcaggtcgcgcaggccgcttcgcgcggcgtggactgggaaaacttgctggtggagacgctggcgctgctgcatcgcattgcgatggtgcagctgttgccttcgatgctcgacaaccaatacgccgccgtggagcaacggctgcgcgagctggcgcgcaccctgccgccggccgatgtgcaactttattaccagacgctgttggtgggccgcaaagagctggcctatgcgccggatcgccgcatgggggttgagatgaccctgctgcgcgcgctggcgtttcacccgaaagcggtgatcccggagccggtggcgttggtgcagaccgcgccggcgccgatggcgcagccgcaggccgccgcatcgccacagccgccgcagtttcaggacgcgccgccgccgctagggcagccggccgcgccgcagcgacaatcatcgactcctttaccggatgccaccgcccagctgttgaaagcgcggtcccagctgcaacggcagcagggagcatccacaccaaaaaagaatgagccggcggcgccaggaatagcgcggccggcaaactcggcgctggggcgtttggcttcggtgaccgagcgcagccagcagcgcctggcggagaagaaggtgccggaaaaaccggcgaaaccggaagcttatcgctggcgcgcgcaaaccgagccggaagcggcgccggaaccgctggcgacgccgaaagcgctgcgcacggcgttggaacatgagaaaacgccggagctggccgccaagctggtggtggagtcgctggagcgcgacgcctgggcggcagaaatcgataagctgaagatcccgaaattggtgcagcagctggcgttgaacgccttcaagcagcagccggagccgggcaaaattaacctccatctgcggtcttcgcagcgccatctgaattcgccttcggcgcagaagacgctggccgacgcgctcggtgagctgtacggcggcccgattgagctgaccgtggtggaggacgataatccggcggggcgcaccccgctggagtggcgacaagccatctatgaagaaaaactggcgcaggcgcgccagtccatcgaagcggataccaacattcagacgctgcgccgattcttcgacgcggatctggatgaagagagtattcgccccctttaaacgccgcgcgaggtgcgcggccctagcgacgagagacgactatgtttggtaaaggcggtctgggcaacctgatgaagcaagcccagcaaatgcaagaaaaaatgcagcagatgcaggaagaagtcgccaaattggaagtgaccggcgaatccggcgcgggcctggtgaaagtcaccatcaacggcgcgcacaactgccgccgcgtggagatcgatcctagcctgatggaagacgacaaagagatgctggaagatctgatcgccgcggcgtttaacgacgccgcgcgccgcatcgaagagactcagaaagagaaaatggcctccgtctccagcggcatgcagttgccgcctggcttcaagatgccgttctgatgcaaaccagcccgctccttgaatccctgatggaggcgctgcgctgcctgccgggcgtcggcccgaaatcggcgcagcgcatggcgtttcaactgctgcagcgcgatcgcagcggcggcatgcgcctggcgcaggcgttgacgcgcgcgatgtcggagattggccactgcgccgactgccgcaccttcaccgaacaggacgtctgcaccatctgcgccaatccgcgccgccagcaaaacggccagatttgcgtggtggaaagcccggcggatatccacgccatcgagcagaccggccagttcgccgggcgctactttgtgctgatggggcatctgtcgccgctggacggcatcgggccgggcgatatcggtctggatcgcctggagcaacggctggaaaaggaaagcatcaccgaagtgatcctcgccaccaacccgactgtggaaggggaggcgaccgccaactacatcgccgagatgtgcggccagtatggcgtgctcgccagccgcatcgcccacggcgtgccggtgggcggcgagctggagatggtcgatggcaccacgctgtcgcattcgctggccgggcgccacgccatcaagttctgatgttttcccggatggggccgcccggccccattgttttttgccaaaaaaatcccgccgtccgcttgaaaaacaacaccctgaccctcatctgatcctcattgttcgattttggtagccattgtcttttgaggtaatcaatgagtatgaaaggtcaagaaacccgcgggttccagtctgaagtaaaacagctgcttcatttgatgatccattcgctgtactccaacaaagaaattttcctgcgcgagctgatttccaacgcctctgacgccgccgacaagctgcgcttccgcgctctgtccgcgccggagctgtatgccggcgacggcgagctgcgcgtacgtttgtccttcgataaagagcagcgcaccctgaccatcgccgacaacggcatcggcatgcgccgcgaagaagtgattgaaaacctcggcaccatcgccaagtcaggcactaaagcgttcctggaatccatcggttccgatcaggcgaaagacagccaactgatcggtcagttcggcgtcggtttctactcggcgttcatcgtcgcggacaaagtgaccgtgcgcacccgcgccgccggcgccgccgatgacgagggcgtgttctgggagtccgccggcgaaggcgactacaccatcgccgacatcaccaaagagacccgcggcaccgaaatcaccctgcatctgcgcgaaggcgaagatgagtacctcgacgcctggcgcctgcgctcggtgatcggcaaatattccgatcacatcgctttgccggtggagatcgaaagcaagaacgaagaagacgataccgtcacctgggagaagatcaacaaggcgcaggccctgtggacccgcagcaaggctgacgtgaccgacgaagagtacaaagagttctacaaacacatcgcccacgacttcaccgatccgctgagctggagccacaaccgggtggagggcaagcaggaatacaccagcctgctgtacatcccggcgcaggcgccgtgggacatgtggaaccgcgatcacaagcatggcctgaagctgtatgtgcagcgcgtgttcatcatggacgacgccgagcagttcatgccgaactacctgcgcttcgtgcgcggcctgatcgactccaacgatctgccgctgaacgtatcgcgcgagatcctgcaagacagccgtgtgacgcaaaacctgcgcggcgcgctgaccaagcgcgtgttgcagatgctggataagctggccaaagacgacgccgaaggctaccagaaattctggcaacagttcggtctggtgctgaaagagggcccggcggaagacaacggtaaccaggaagcgatcgccaaactgctgcgcttcgcctctacccacggtgacagctcggcgcagaccgtatcgctggaagactacgtcggccggatggcggaagggcaggagaagatttactacatcaccgccgacagctacgccgcggccaagagcagcccgcacctggagttgttccgcaagaaaggcatcgaagtgctgctgctgtccgatcgcatcgacgagtggatgatgagctacctgaccgagttcgacggcaagccgttccagtcggtcagcaaggcggatgaagcgctggataaactggcggatgaaaccgaagagcagaaggccgccgagaagcaactggaaccgttcatcgaacgcgtgaaaaccctgctgggcgatcgcgtgaaggatgtgcgcctgacgcaccgcctgaccgatacgccggcgatcgtggtaaccgacgccgacgagatgagcacccagatggccaagctgttcgccgccgccggtcagcaggcgccggaagtgaagtacattttcgagcttaatccggaacatgctctggtcaaacgcgcatccgacgtgggcgataacgaacatttcgccgagtggatcgacctgcttttggatcaggcgctgttggctgaacgcggcacgctggaggatccgaacctgttcatccgccgcatgaacaagttgctgtccgcctgaagttgattatatgcgcccttaacggcaccgttaggggcgcatttccggtttttccccgcattttcccctcttttgttcgcttgaatttttgcacattccgcaatcgatttccttcgcgcgccttgagcctgccccccctgaaatggtatcgttgagcgttttcgcaattttataaaaactacatagcaaggggatttacgcaatgcgtatcattctgctgggcgctccgggcgctggtaaaggtactcaggctcaattcatcatggagaaatacggcattccgcaaatctccaccggtgatatgttgcgcgcagccgtgaaggccggcagtgaactgggcaagcaggcgaaagagatcatggacgccggcaagctggtgaccgatgagctggtgatcgcgctggtcaaagagcgcatcgctcaggaagattgccgcaagggcttcctgctggacggtttcccacgcaccattccgcaggctgacgcgatgaaagaagccggcatcaacgtggacttcgtgctggagttcgacgtgccggatgagctgatcgttgaccgcatcgttggccgccgcgtgcacgcgccatccggccgcgtataccacgtgaaattcaatccgccgcaggtggaaggcaaagacgacgtgaccggcgaagagctgaccacgcgcaaggacgatcaggaagagaccgtgcgcaagcgtctggtggaataccatcagatgaccgcgccgctgatctcttactacagcaaagaagcggcagcgggcaacacccaataccgcaaaatcgacggcacccgcaaggtggccgaagtgagcgcagagctggcgaccatcctcggttgatcgcaagcgcatcgtgcatgacgccgggcccgtggcccggcgtttttttttgccgttttcccgttaaattgtgatcgcggcggcttgttgcaaccgtgcccgttaatcgcccgcgccaaatggcgtataacaagcctgcgttttcaccctcagcagggagccgggcatgctcagacaaaccactcttctggcggaagccaccgcgcgccagatcgtccagcgggcgatgggcatcatcagccattccgtcaacgtgatggacagcaacggcgtgatcatcgcttccggcaatccgcagcgtctgtttcagcgccatgagggcgcggtgctggcgttggcggagaatcgggtggtggagatcgatcgcgccaccgccgagcatctgaaaggggtgcggcctggcatcaacctgccgttcagctttcgtaatcagcgagtgggggtgatcggcatttccggcgagccggccgaggtgcgcgcctacgccgagctggtcaagatggcggcggagatgatggtggagcaggcggcgctgctggatcagcaccagtgggaaaaacgctaccgggaagagctggcgaatcagctgctgcagccgcagccgaacaccgcgtcgctggaggcgatggcggcgtatctggggttggatctgcgccaggcgcgcatcgtctggatcgtcgaactgcaagaggcgcagccgcacctgctgcgcgagctgttggcggagctggaggccacccagcgcgacgcgttgatcgccattaccggcttcaatgaaatgactctgttgcgcccggcctgcatggctcagggcgaatggagtttgaagctggagcgccaacaggcgcagcgtctgcaaaaccagctcaagcaccgctttcgggtacggctgatcgtcggcggtttctacgacgatccgcaaagcgcctaccgctccagcctgaccgcgcgcgccacccaggcgatggcgcagcgcctgaaattgcgtcacgccacgctgttctaccacgactatccgctgccgtcgctgctgtgcgatctcggggaggactggcgcgcgcaagagctggggcgtccctggcgaacgctgggcgaacaggacgaaaaaaacgtgctgcgcagcacgctgcgccactatttttcgcagaattgtgatcagacgcagaccgccgcgcagctgcatattcacgtcaataccctgcgttatcgcctgcagcgcatcgaggcaataaccggcatgaaaatcaatcaattaaccgatgctctgcggttgtatatcggcatgctgatgcacgactgaattgtgccaacccacaaattccgcgccgttcccccggcgattttttgttgttttccctcaggtctgcgccgggcgcgcgcgatatgttggcctgcacatcaaccacggagaaaacaacaatgacaaccgtatccactctgggggcgctggtggcgttagccgtcgccatcgtcctgattctacgcaaggtgccgccggcttacggcatgattgccggcgcgctggcgggcgggctgtgcggcggcgccgatctggtgcagaccgtgacgctgatgatcggtggggcgcagggcatcaccaacgccgtgatgcgcattctggcggcgggggtgctggccggggtgctgatcgaatccggcgcggcgcacaccatcgccgaaaccatcgtgcgcaaggtgggcgaaacccgcgcgctgctggcgctggcggtggctacactgatcctgacggcggtgggggtgtttatcgacgtggcggtgatcaccgtcgcgccgatcgccctgtcgatcgcccagaaggccggcatttcacgcgcggcgatcctgctggcgatgatcggtggcggcaaggccggcaacgtgatgtcgcccaacccgaacaccatcgcggcggcggacaatttccacgtgccgctcacctcggtgatgatggccggcatcgtgccggggctgtgcggcctggtagtggcctatctgctggcgcgccgcctgagcgataaaggcagcaaggtgatggccgaagagctgactcagcatgccgaaggggcgcggccgggcttcgcggcggcgatcagcgcgccgctggtggcgatcctgctgctgtcgctgcggccgatcgccgggatcgccgtcgatccgctgatcgcgttgccggccggcggtttggcgggcgcgctgttgatggggcgcattcgccagtgcaatcagtttatggtctccggcctgtcgcgcatggcgccggtggcgatcatgctgctcggcaccggcacgctggcgggcatcatcgccaactcggcgctgaaggatgtcctgattaacggcttaacgcacaccgggctgccggcctggctgctggcgccgctgtccggcgcgctgatgtcgatggcgaccgcgtcgaccaccgccggcaccgccgtcgcctccggggtgttcagctccacgctgctggaactgggggtgagcgggctagccggcgcggcgatgatccacgcgggcgccacggtgctggatcacctgccgcacggcagcttcttccacgccaccggcggcagcgtcaatatggcggtgcacgagcggctgaagctgctgccgtatgagacgctggtggggttcaccatcgcggcaatctcggcgctgatgtttggcgtatttaacctggcgggataaggaacagtgatgaaaacgctgaaaaaagtggttattgccccggattctttcaaagagagcctgagcgcgctcggcgtcgccgacgccatcgagcggggattccgccaaatctacccgcaggcgcactacgtgaagttgccgatggcggatggcggtgaaggcacggtggagtcgatggtggcggccaccggcggcgagatcgtccaggtgacggtcaccgggccgctgggggagccggtgcagggattctatggcctgctgggcgatggcgaaaccgcggtgattgaaatggccgccgcctccgggctgcatctggcgccgcccggccggcgtgatccgcgcatcaccaccagttacggcaccggcgaactgatgttggcggcgctggaacgcggcgtgaaggcgatcattctcggcatcggcggcagcgccaccaacgacggcggcgccgggatgatgcaggcgctgggcgttaaattgctggataaggatcgtcgcccgctgccggtgggcggcgcggcgctggcgcagctggcgcacctcgatctcgccgggttggacgcgcgctggcaacgggtgagcgtgaccgccgcctgcgacgtcgataacccgctgtgcggcgaaaagggcgcctcggcggtgttcgggccgcagaagggggcgacgccggagatggtggcgcagctcgatgcggcgctgcaccactacggcgagctgctggaacgggaaactggccgcgccgtgctcacccagccgggcgcgggggcggcgggcggcatgggggcggcactgctcggcatgctcagcgcgcgcttgcggccgggcatcgagattgtcactgaaaccctgcgcctggatgaggcggtgcgcgatgccgatctggtgatcaccggcgaagggcggctggacagccagtcgattcacggcaaaacgccgattggcgtggcgcgggtggccaagcgccacggcgtgccggtgatcgccatcgccggcagcctgacgccggattattcggtggtgcatcagcacggcatcgatgcggcgttttcggtgctcgatcgcattgtgacgctggaagaagcgctgacggacgccgatcgcaatctgcaggtgacggcgcgcaacgtggcggcggtatggcagctggcgcagggaagaagcccacaggcatagcctgttgctgttatcggtttcgatgcaggacttttccgttacaatagccggcattaatggctgctgacatcccgacccagaacggaatgccggccggaaaggaaatgaggggaactgagatgaagcaagagaaacacggcgtattgctggtgaacctgggcacgccagatgcgccgacctcgtctgcggtcaaacgctatctgaaggaattcctcagtgacgatcgcgtggtcgatacggcgccgctgatctggtggccgatcctcaacggcgcgatcctgccgatccgctcgccgcgcgtggcgaaactctatcagtcggtgtggatggaagagggctcgccactgctggtgtacagccgccgccaacagcgggcgctggcggcgcgcatgccgaatacgccggtggagctgggcatgagctacggttcgccaagcctggcggaagccatcgacaagctgctggcgcagggcgtgactaacctggtggtgttgccgctctatccgcaatattcctgttccaccagcgcggcggtatgggatggcgtggcgcgggtgctgaaaggctatcgccgcttgccttctgtggccttcattcgcgattacgccgaacacccggcctatatcgccgcgctgcagcaaagcgtggagcgctcgttcgccgagcacggccagccggaccggctggtgttgtcgttccacggcatccccaagcgctatgcgcggctcggcgacgactacccgcagcgctgcgaggatacgctgcgcgcgctgagcgccacgctgccgctggcgccggagcgggtgatgatgacgtaccaatcgcgcttcggccgcgagccgtggctgacgccgtacaccgatgaaaccctgaaggggttgccggcgcagggcgtgaagcacattcaactgatttgccccggcttctcggcagactgcctggaaacgctggaagagatcaaagagcagaaccgcgagatcttccttaaggccggcggcgagaagtttgaatatatctcggcgttgaacgacgagccggcgcatatcgacatgatgcagcagctggtggcgcagcgtctgtaatcatccataatctgtctattaggtgcatcgtgatcgggcggggatgtgttaacattctccgcttgttaaaccgtcaccaccgccaatcacatgaaatttcctggtaaacgcaagtccaaacactattttccggtgagcgcccgcgatccgcttctgcagcaggcccagcccgaaaatgaaatcagcacctcgtatattgtcggcatcgaccagacgctggtggatatcgaggcaaaagtggacgatgcttttgtccagcgttacggcctgagcctgggccactctttggtgatcgaagacgacgtcgccgaggcgctgtatcaggaactgaatgaaaacaacctggtcacccatcagttcgccggcggcaccatcggcaataccatgcacaactattcggtgctggcggacgatcgttcggtgctgctcggcgtgatgtgcagcaacgtgaaaatcggcagctacgcctaccgttatctgtgcaatacctccagccgcaccgatcttaactatttgcagggcgttgatggcgccatcggccgctgtttcacgctgatcggcgaaagcggcgagcgcaccttcgccatcaaccccggccagatgaaccagctgcgcccggaaagcattcctgaagaggtgatcgccggcgcgtcggcgctggtgctgagttcttacctggtgcgctgcaaggaaggggagccgataaaggacgctaccctgcaggcgatcgagtacgccaaaaaacacgatgtgccggtggtattgacgctgggcaccaagtacgtcattgccgacaacccgcagtggtggcgcgacttcctgaaggaaaatgtgacgattctggcgatgaacgaagacgaagcgctggagctgaccgggctgagcgatccgctgaccgcctcggacatggcgctggagtgggtggatctggtgctgtgcaccgccgggccgaatggcctgtatatggcgggctacaccgaagaagccaataagcgccagacccagcacccgctgctgccggggcatatcgccgagttcaaccgctacgagttcagccgcgccatgcgccgcgagcactgtgaaaatccgctgcgcgtttattcgcatatcgcgccgtatatgggcgggccggagaagatcatgaacaccaacggcgccggcgacggcgcgctgtcggcgttgctgcacgatatcgccgccaacggctatcaccgccacaacgtgccgaactccagcaagcatgtgcgcagttacctgacctactcctccctggcgcaggtgtgcaaatacgccaaccgcgtcagctaccaggtgttgaaccagcattcgccgcgcctcacgcgcggcctgccggagcgggaagacagcctggaagagtcctactgggagcgttaacccgctgaaaaagaaaaggtccggcaatgccggacctttttttatgcgcggtgcctcagatcgggcagccgcccattttttcttcttcgctcagggtgtccaactgcaggatgttcagcatgctgttggcgatctcgcgttcgcccatgaccacctgattggcgccgcgatcggtgatgtaggccacttcatcgtcgtagtgggcgcgggcgatgatctcgatattcggccgcttggcgcgcgccgaggcgacgatctcgccggcctcgtagccgttggggatggtcagcagcagccagcgcgcgcagtcgagcctagccagatccatcacttccggattggcggcgttgcccagcaccgtcttgataccctgttcgcgcaacgcttccacccgcgggcgggaattctcgatcaccaccagcggaatgcccgcctcggccagtttgccgcccagcaggctgccgacgcggccgtaaccgaccaccagcgcgtgattgcacatatccaccgggatctgtttctcttcttccaccgcctcttcgaggatttgctcttcgatggtttcggttttggccagatagcgttccagcagggtgaacaacagcgggttgagcatgatggacagaatggcgccggccagcaccagattgcggccgtgctccgacatcatgccgagcgcgatgccgaggcccgccaaaataaaggcgaactcgccgatctgcgccaggctggcggaaatggtcagcgcggtgcgcttggagtgaccgaacattttcaccagcaggaacgcggcggcggatttgccgaacacgatgatcgccagcgtcgccagcaccgccagcggttcgttaatcacgatcatcggatcgaacagcatgccgaccgagacgaagaacagcaccgcgaacgcgtcgcgcagcggcagggtgtcgtgcgccgcgcggtggctcagctcggactcgttcagcaccatgccggcgaagaaggcgcccagcgcaaaggagacgtcgaacagcttcaccgcgccgtaggcgatgccgagcgccagcgccaataccgccagggtgaacagctcgcgcgagccggtgctggcggttttcgacaggatccacggcaccaggcggcggccgaccacgatcatcagcgcgatgaaggcgatgactttaccgatggtcagcgccagctccatcagcagctggctgctgctggcgttgtcattgcccagcatattgccgaaggccggcaacaataccagcgtcagcaccatcgccaaatcttcgacgatcagccagccgatggcgatttgcccgcgctggctgtcgatcagttgccgttcctccagggcgcgcagcagcaccacggtgctggcggtggagaggcagaggccgaacaccagaccggagatcagatcccagccgagcagcttggacagccccatgccgagcagggtagcgacggctatctgcgccacagcgccgggaatggcgatagattttactgcgaggaggtctttcaaagagaagtgcaggccaacaccgaacatcaacaggataacgccgatttccgccagttccggcgccagtgaggtgtcggcgacgaaaccgggggtgaacgggccggcgagcacccctgcggccagataccccaccagaggggagatgcgcaggcggttcgccagcatgccgaggaggaaggcgagtactaaccctccgacgatggtggtgatgagcggtgttgaattatgcatccatactccttctggctatgcatcgcggcacgggagaaacgcaacaaagttacgaaaagatacatttagtttattgcatttgttcgcggcttgcttggctaatttggccttttttgtaaaaaagcagaggatttcacttaaggcatggcaatgagggggttttgtggcagataaaccaaataacattgatttatccgtaggataacccggatgaataaataatttcatccgggcaggcagcggagttattgcgctttatgctccatattgggcagtagcgcggtaataatgccgataagcggcaggaaagcacagatttggtagaccagttcgatactggtcaaatcggcgacataaccaagaactgccgcacctaacccgcccataccgaaagcaaaaccgaagaataagccggaaaccatgcccactttaccggggatcagctcctgagcgtagaccagaatggcggagaacgccgaggcgagaataaccccgatgatcaccgtcaaaatgccggtccaatagagggatgcatagggtaaaacaagggtaaatggtgcagcgccgagaatagagccccaaatcacgtatttacgccctatcttgtcgccaagaggcccgccgataatggtgcctgctgctaccgcaaacaggaaggcgaacaggtgaatttgggcattctgcaccgaaacaccgaacttatgtatcagataaaaggtgtaatagctgctgatgctggccagatagaagtatttggagaaaatcagcaccagcaggatgcccagtgagtaggccacggtacgttttggcagcggtttcagcagcgacgggcttttcggctgccctttagttgcccgatgctgatgttgataccacttgctgacctgcagcaacaccacgatcgccagcagcgccgccagcgagaaccaggcgacgttgcccttgccgtaaggcgcgatgatcagcgccgccagcagcaggccgagcgagctgccgaagttgccgccgacctggaacagcgactgcgccaggccgtgccgcccgccggaggccatgcgcgccacgcgcgaggattccgggtggaagaccgatgagccggtgcccaccagcgccgccgccagcagcaccagcgggaaggtgctcgccaccgacagcagcagcaggccggacagggtaaagcccatgccgatcggcagcgagtaaggctgcgggtgtttatcggtgtaatagccgatcagcggttgcagcagcgaagccgttagctgataggtcagggtaatcatgccgatctgcacgaagctgaggtggaaatcggcttgcaggatcgggtaaatcgccaggatcagcgactggatcatatcgttgagcaggtgagacacgctgatggcgccaaggatggagaaggcggtgcctttcaccgcactgcctttggcgggcggtatcgcgctttggctactgtcggtcatattattattagcctgataagttgttgagcacagagatgacatcttaggcaggacgttcaatttttaccatatctgaaataatcagactcacatcgcaaaaaattgaaatcagctgtcattaattcgcgctacaatttcggcctcatcataaaagccatttaatacacggagatccgccatgcgtttttcgctgaaaaccaccgcatgcgcgttggccgtttccctgacgttgctgtcgggggccgccagtgcctgggaaaaggataagacctacgccatcaccattctgcacaccaacgatcatcacggtcacttctggcagaacgatcacggcgaatatggcctgggcgcgcagaaaacgctggtggacggcattcgtcaggaagtggcggcgcagggtggcagcctgctgttgttgtccggcggcgatatcaataccggcgtgccggaatcggatctgcaggacgccgagccggacttccgcggcatgaacctggtgggttacgacgcgatggcgatcggtaaccacgaattcgacaacccgctgagcgtgctgcgccagcaggagaagtgggcgaccttcccgctgctgtccgccaacatctaccagaaaagcaccggccagcgcctgttcaagccttacgccctgttcgacaagcagggcatcaagatcgcggtgatcggcctgacgaccgacgataccgccaagataggcaacccggagtacttcaccgacatggagttccgcgtgccggcgcaggaggcgaagcaggtggtagagcaactgcgtaaggacgagaagccggacgtgattatcgccgccacccacatggggcactatgacaacggcgaacacggctctaacgcgccgggcgacgtagagatggcgcgcagcctgccggccggatatctcgacatgatcgtcggcggccactcgcaggatccggtgtgcatggccggcgacaaccgcaaacaggtggattatgtgccgggcacgccgtgctcgccggatcgccagaacggcacctggatcgtgcaggcgcacgagtggggcaaatacgtggggcgcgccgatttcgaattccgcaacggcgagctgaagctggtgcattatcagctgatcccggtgaacctgaagaagaaagtggagaaagcggacggcaccagcgagcgggtgtactacacccggcagattgcggaagatccggccatgatgaagctgctgacgccgttccaggataagggcaaggcgcagctggaagtgaaaatcggcagcgtcaacggcaagcttgaaggcgaccgcagcaaggtgcgcttcgtgcagaccaacctggcgcgggtgatgctggccgcgcagagggagcgcgccgacgccgacttcgccgtgatgagcggcggcggggtgcgcgattcgattgaaagcggcgatatcacctacaagaatgtgctcaaggtgcagccgttcggcaacaccctggtgcatgtcgatatgaaaggcagcgaggttgaggagtatctggcggtggtggccaacatgaagccggattccggcgcctacgcccagttcgccaacgtcagcctggtggcggacggcaagggcgtcagcgaggtgaagatcaatggccagccgctgcaggcggataaaatttaccgcatggcgacgctgaacttcaacgcgctgggcggcgacggctatccgaagctggacgggctgccgagctacgtcaacaccggctttatcgacgccgaagtgctgaagcaatacatcgagaaacactcgccgctggatgcggcggcttacgagccgaagggcgaaatcgtttatcgctaatcgccaccgcagcggcctgccccatgggcgggccgcctgttttcccgccgaaaaccccgccccaaacgcacgcaaaagtcgccgccgccgccttccaatgatagcctgagcgacaatttggttttgataacgcaaacaggaagatgacatgttgaaaaccgcaggctggctgctgcccgccatcgtggcgctggcggggtgttcgtcatccggccaacgtcacgaacaaaccctcagccaggcgctggcggccatcggccaggacaaggcgctggttggggcgtcgagcggcgtgatggtgcgcgatgccgagagtggcaaggtgctgtatcaggcgcacgcggatcagcgtttggcgccggcttccaacatgaagatgttcacttctctggcggcgttcggcgtgctgggggccgattatcgctttgaaacccggctgttgaccgccggcgagcagcgcggcgacaccttgcgaggggatctctatctgcagggcagcggtgacccgacgctgcatccggacgatctcgacaccttcgccgcagcgctggcacagcgcggcatccgtcatatacaggggcggttgttgctggatgccggcgccttcgatcagacgcctttcggcgccggttggagctgggacgatgaacctttcgccttcgctgcgccgatctcggcgctgaactacgcctttactcccggcggcgatatcaacgtggtgcaggtggcggtgcggccgggcgcccgcgccggcgcgccgggacgggtgagcttctatcccgccaatgacgcggtgacgctggtcaaccgcaccaccaccggtagtgacaccgcgctgacgtacgagcgccggccgggcagcaaccggatcgtggtcagcggcaccatcgccgcgcaggcggaggccagctcgcgattgattaccgtcgatcaaccgtcccttgtcgtcggcgctttattgcaacatgctctgcgcgcgcacggcatcaccctgcgcggcaaggttgaagagggcgtgacgccggccggcgcacagctgctggcggaaaaaacctcgccgccgctctcccgcctggtcgtcaccttcctgaaagtctccaataacggctacggcgagatattgaccaaggcgatgggccgcaagacgcagggtaaaggggattgggccgccggccttcaggcgataaacggatttgtgcaaagccagggcgtcgcggccgacgcgtatcgccaggtggacggttccgggctgtcgcgcatgaaccaaatcacgccgcagcagctgacgacgctgctgctggcggccagaaaacagccgtggtttgccgactggtatcacgccttgcccgtcgcgggcgagccggggttgctggtgggcggcacgctgcaaagccgcatggtgaacagcgcggcggcggggcgcgcccacgccaagagcggttccatgaccggcgtatcgtcgctcagcggctatgtcgattcggcgaccgggcggccgctggcattcgccatcatcagcaataactatctggtgcccggcgcgcaggtgaaggcgctggaggaccgcctggtggagacgctggcggcctgtgacgccacggtggtgtgccgctgagcgcgcggcgtcagtcgcgtttggcgatgtcggcgaagctgccggccagcaggcggcacagatcggcggcggccagttcgatgtccagcccgcgtttgccgccggaaacgtagatggtggcgaacgcttgcgccgggctgtcgatcaccgtcggcagccgttttttctgccccagcgggctgatgccgcccaccagataaccggtgacgcgctgcgccaactgcggatcggccatctcggcctttttggcgccgagcgcgcgggcgaccttcttcaggtccaactgggtcgcgaccggggtgaccgccaccgccaggtgtttggcgtcgccgttcagcgccaccagcaaggttttgtaaacccgatcggcatccagccccagctttctcaccgcctcgtcgccgaagttggtttcgtcgctgtcgtggtgataaggatggagggtgaaggcgaccttttgtttctcaagcagaacgactgcgggcgtcatgatgtgttgtccaaaatgtccccggcggggaaagggtgataaccagccttaaaaatacaaaaatccaacctgcccggcaacctgagcggctgttacataaagcgggttgccaagatattcaccgggttgctaccctgtttactgtaaccgttaacacggttgctatgcgtataactagaatacaagaaattcctctttgactggccaatagcgatattggcctcttttttacccctgcggctgcagcatcgccggcaggttatcctcgccgtacaggtgcaatgcgccaaccgccaccacatagtcaccggcaggcagcgcctccagctgatgccgccagtcgcgattgcgctgatgcatcagcacgtcatacagcccggcgctgaaggtggcgggcagcgtgtccagcgtaccgcgcggtttggcgtccagccaccagctcaccatggtttgcagcagccgcgcgttggtatgccagtgctccagcgtatcgcgcagcagcgcaatgccgccctccggcaattgttccagcatcgccagctgctgctgcgcgccttccagctcgatcaccggtttgtcctgcgcccgggcggcctgcagcagctgatagtccacgccatattccgcgcgcagccccaaacgctgagcctggcgcgcctgcatcatcagcgccacctgccagccgggcagggtagcgaaggcgtgcgggtcggcgcccagctcatggcacagcgccagcaaccgttgatattcttcggcggacaggcgctgttccagctctggctgcagctcggcgtggtcgaaaggggaggcggagtcggtgatatcggcttcgacgatcagcgcgtcggcctgctgcagccgggcggccagccggggcggcaacggcgacatatcgacggtgcccatatggatgctgcccaccagatgcagccgacgatcgccaggcagggtgatgtccaacgccggataagcgtaacgcttgggcgagatcaggccgagaaaggcggcgaggcggcgtaacagttgacccatacggcgtggctcctgaataacgggtgcgcgtttcagcatgaaaggcgaggggaaatcgttattcatgctaaacgctatccgccgcgcaggaaagcccggaaaacagcggggcgccatgacggcgccccggcgatcacttctgcggtttaaaacgcagcaaccggttggcgttgctgaccacggtaatggacgacagcgccatcgccgcgcccgccaccaccgggctgagcagcgtgccggtcagcgggtagagcacgccggcggcgatcggaatgcccagcgtattgtagataaaggcgccgaacaggttctgcttcatgttgcgcagcgtggccttcgacagctccaccgcatccgccacgccgtgcaggctgtggcgcatcagggtgatggcggcggtctcgatggcgatgtcgctgccgccgcccatcgcgatgcccacgtcggcctgcgccagcgccggggcgtcgttgatgccgtcgccgaccatcgccacgcgctggccctgcgcctgcaactgtttgatcgccgccgctttgccgtccggcagcacgccggcaatcacccgatcgataccggcctctttggcgatggcgttggcggttaccgggttgtcgccggtcagcatcaccagctgatacccctgctggtgcaggcgctgcagcgccgcgacgctgtcctcgcgcagcggatcgcgaatggcgaacagcgcggccggtttaccgtccacggccagcagcaccggcgttacgccgcgttcggcctgggcgcgcatcggcgcatccagttcggcggtcgcgacctgatgctgttccagcagcgcggcgttgcccagcagcacctgcacgccgttgatctccccgctgacgccggcgccgcgcagggtgcggaactgcgcgacctgcggcagcgtttgcccggcggcgcgttccatgatggcgcgcgccagcgggtggttggagccttgttccagcgcggcggcccagccgatcgcctgctgttcgctgacctgattgaaggtcaggatctccaccacctgcggtttcccttcggtcagggtgccggttttgtcgaacaccagggtgtccagctggctggcctgctgcagggcgtcggcgtcgcgcaccagcacgccgaactccgccgcgcggccgacgccggagatgatcgacatcggcgtcgccagacccaatgcgcacgggcaggcgatgatcagcaccgtggtggcgatcaccagcgtatagaccagctgcggctgcgggccaaagaagtaccatatcgccgcgctgaacagggcgatagccactaccgctggcacgaacaccgccgagacgcggtcagccagttggccaatcgccggtttgctgctctgcgcctgacgcaccagtttgatgatgcgcgccagcgtggtttggctgccgatggcggcggcgcggaacagcacgctgccgtcgtcgaccaccgtcccggcatgtaccgtatcgccggcgcctttctgctgcggcaccgcttcgccggtcagcatcgcttcatcgagccagacttcgccctgtacgatttcaccgtcgaccggcacgcgatcgccggtagtcagccgcagcgtcatgccgagctgcacctccgccagcgggatatcgcgctcaccgtcgtcggtcaccagccgggcggtgggcggcgtcagatccagcagccgctccagcgcctgtgaagaacgctggcgagcgcgctgctccagcgcatggccgaggttgatcaaaccgatgatcatcgcgctggcctcgtaatagaggtggcgcgccgccatcgggaagaaatcgggccaaacgttgacggcgatcgagtaaagccaggcggcgccggtgccgagcgccaccagagtatccatggtggcgctgccgttcatcagcgcgcgccaggcgttgcggtagaagtgtccgccggcgaacaccatcaccgccagggtgatgacgccgaccagcagccaggggcgctgggtttccggcgtcagcgtcatgctgccgccgaacagcccccaggccatcagcgggatacccaacgccagccccagcgccgcctgccagctaaagcgcttcatgttggcgcgtgcggtctgctgctggcgttcgcgacgttcggtctcgtcctgaatcatctcggcgccgtagccggctttttccaccgccgccaccagcgcttgcgcatcggcggcgccggtcaccagcgcgctgcgttccgccaggttgacgcgcgcgtgctctacgccgggtacgctttgcagcgcctgctgcactttattgacgcagctggcgcaggtcatgccgctgagcagcagctgtacgctgtcgtccgcgctgtcggttgccggaagggaaggttgcgccgctggctgaacgtccggcaacgaaggtgttgcgtcagtcaacggctcagtttttgggacgacggcgcccgccacgctggcgtgataaccggcgtgttctactgcggcgatcagcgcctgcggatcggcatcgccgtacactttcgcgctgtcgatctcgacctcggcggcgaacacgcccggcaccgcttccagcgccttgcgggtgctgccgacgcagtgcatgcagctcaggccgctcagctgcagttcggtatcggcgcgcggcgcgacttcggcctgataaccggcggcgatcacgctgtcgatcaatgcgctgtccggcgcttcgccggtcactttggcgtaatgcacgttaacgtccgcctgttcgacatcgctgcggctttccagggcttttttcacccgttgcgcgcagttcatgcaggacagcccctgcaatgccagcatagtggtgtgtgacatgattggactccttgcttaagggcggtgtttaaaggttgaccgcctgacctgttttcactaagaagggagcttaaaccttccagcaagggtaaggtcaaggcggtttttacttgcgcgggcgtgacggtcgttttgtgttgtataacaaggtgttttatcggcggcagcgcggtcggcttgcccgagccgcgctgccgcgttggggttacagcacgaaaggaatgaaacatttaacctggcgtttatagttgcgccaaacctcgccgtagcgcttctctgccattttctcgcttttgggaatggcgtcggcgaaatactgcaccaggttagtcagcggtgcgatcaggccaaacaggttgccggcaagcagcccgaagctgacgaaaataagaaagtcgccgaaataattcggatggcgcgccaacccccaaaagccactgttcagcagccggcctttattgttcggatcctgtttgaagcgccgtttttgataatcgctgccgaagtggaacagcgtgcctatcaggtagaccccaatggccagccattgcagcgcgctccacggcccctgcagctggctggcccagtagaagggcaggcagtacaggccgccgaagatcatgaccatcatcaccgccagccatggcacctgctgcgtgggcatcacgtccttgagtttggccgcggcggtgttgccgtaccaacgtgtcagcacgatgttcatgcgcagcaggtacaggccgaccatgacaaggatcagggctttgtggctcagatcgccctcgccgaaatagcaatagaccagggtaaccggccccatggcgttgaacccccacagaaacatcgggcgagtgtcctgagcgccgcggctggtaataaacgccagcagggcaaggatcaacaaaacagcggccaaagcaatccatacgttcattgtgttctcctcagcggattaggggaaatcgttccccgggggcgcgcattcgccggatggcggcgcggtcaaaatgctttgccagctgcgtctgggtgctgcgctgccccattgttgcaggtggccgaagcgggcaaaaaacaccgggggagcgctgagcgccagggttgctgcgagctcgcgacgcgcctcggcgtgttgcaccagaacgctgatcggatgcaatccccaaccccagtgttgcagcgtgagccacagacgtccaagccgcatgccggtggcgaacaggtgctcggcactttcgtcgttcagacacagcgccaggtattgcgggccttccgcgacgcgttgcgccagcccttgcgccatataagccggcaagcgcagcccggtcgccagccggcttaagcgaggatgaaacgccacttggaagaagcgcttgaatgctggggataccgggccaaacaggtggtgcaggtgaaaaccgtcgtcggtaggctgccgttcgttgaagcggatgtattgataggtttcgcgccaggcttggcgatccgagaaatcgagcgcggcgtgacgagcggtgagctgcgcgacccgacggcgagcgcgttcgtcacctgcgatactgagcgaactcgccgttccgtcgaacagggtctgcagctgcatccgctgcgcttcattgattggcgtaggctgataggccgctcgtgcggtatgccgctcgccgatcagctgcgccaattggtgatgggcggcgcgatcgggcgcggcaggcgcggcgggggcaaagctcagtaaatgcgtggggccatgctcccaacgccaggcgagaggcgagcctgcacagttgagcagcgcgctgaggtactcgaagaaaatcccgcagctcatcagcatctcgcgttccagcgaaggcaggctctgcaaggcgcgacggcggtcgatagccaaccggccacatcgggcggcggcgttatagtggagagaccagggttggcagttgtgtgaagagggcgcctgccgcgcgatgtccacggcctgttgcagcgccgcggcgaaaaggtcttgggtcatgataaggctccgaaagctgaaggggcgggcagggaaaatacggtaacgttcgctctgaacgacatgctttcctccgccggaaagcagagtgcgcatgcccagtccaggctgcgccacagccagaagcgtctgctcgccaaactgccgtcggcgcttgagaccaacccggtgtgccagtcgatgccgatcgtccgcaattcgtagggcaggccgcggccgtggctttttaaaaatgcttcgcgaatggcccagacggcgcaggcctgtatgcgtcccaatcgctgctccgcctcgccaaaggcccagcgcagcgccgcgccggagaaggggcgataatgctgcagatcgatgccgagcgggatatcgccggtggcgctggcgtaccaggcatgcgaatggctgagagaaacgtggcggcgtcccagcaggaggtgttcgccgaacggttgtccactcgcctcatggcgcagcgtaaagccggtcgcgtccccccggcaccatgtccggttcagcagcgcgatggcctgtgcccgcgcgtggtttttcaccgccgacagacgccgcaatccccgaacggcggcgcagcggtgggggccgcccagcgcgatgacgatacgtggcgccacgctaagctcgataaccatcggcgatgcgttctccgctgatttcgtcaacgacttccgccaactgattaaagcgttcaaccaggctttgaaacagcggggtttgcatctcgcgctcgaacattttcagcgagttcagctgaatgatttcgataaagtgaaacggcgcctccgccgaagggctgacttcgatgacatcgaaggcgcgtaccgcatcgaggtggcggcaagcctggtaatcggtcgtctccacccagtcgcgaaacgcggcgcggtgggcgatgtcttttagccgaatcttatggacgataatgtgcatctgggcggcctttttaaatgggttgatggataagcaaatggtaattgatgccaccggtgccaaagccgttgatcgccgcccgacgcccgtcttcaccctgtggccagtcgagcgcgatttgcgggatttcggccgggatcgccgccagcggcagttcggcattcaatgtcgccaccggcgtgggcgggatttgaccgtgttcgaaagcgctcagcactttacacaggctgagcgcaccggcgccggcgaaacagtggccgaagttgtacttcaccgaaccgatgtacaaaggggcgcgcgcggcgcggtgatacccctgatgcaatgacgcgacttctgcccgatcgcccagttcggtgccggtgccgtgcgcttcgagatactgtatctggcgcgcttcgacggcgctcaggctctgggttttttcgattgccaacgcctggccctcgggatcgggcgcggtcatggaatagctgtcgcaagatcccgatatcgcttcgatggtggcgatggcccgcgatgtcgcctggccggtcagaatgaagaagccgccaccgtcgccgggagtaaaaccgtcggcttgtcgggcgaaaggccgcatacgcgaagcggaaagcatcatttgcgcgctgcacagcaccatatcgcgttcgagcgtcgccgtttctatgccgccgacgagcaccgcatcgtagcggccggcctgtaacgccctgaccgcattgtgcaaggcggccagcgaactggcgcaggccgcctcgaccgcgtagcagtccgcctcgacgccgagctgttgcgccaacagctgcgcggtgccgaggccgcaggcgccatgccagctccagcggttgatcgcgggttggggcggtggcgaaagggggacgtcggcggaaggcaatgccggccacagcgcgctcatggcctgttgtcgatcggcgctcaaagacaggttgctggcgacgataatggcgatgcgttcaaagcgtcgcaggctgtcgggccacgccgcgcagccgttgagggcgtgcagttgtgtgacgtcgaggcgctgctttttggccggcatcataggccgcgtcagctcaagccgcaccggatcgtgcgttgagaagcacatggcatgagcggtgtaggcgctgagcttttgcggcgtgggtcgcacgaaggcgccggggtgcaactgctcggggctgtgatcgcgcagggcgtcctcaccgttgcgcaaggcctgccagaaacgcgctttatccagcccctgcgcggtgatgggctgatagtcgatgatgctgatgcgtggcgaagccgtcggttttaatgaggggggagacgccgcgtcaatccgccagcggtagccggtgaacgagtggccggcgcacgtctgttgccgttgcaacagcatgtcgaggagatggcagaaaacctgattggcgccggcaaaatagccggcgctcggcgcggcatcctgtcgttcggcgatcagggtcgacaattgcgctatcgctggccatccctgttcctgagcgacgtccagcgggcaaacgaccaggctgatcgccccctccagccaacaggccgaagaggaaacgccctgcgccaacagcatgtccgcctggggttgatggtggaagcattgtacggcggtcagcaccgccatgcggctgtcggcatggcgaaaacagtcttgcgccaactgcagcaagcgcaggccgcccagatcggcgccgtcgagggtttggcatttaccgcgcgtgcgggcgaaatgggcgatgcgcgcgggaatgctggaggccatttcccctacgcgatcgtgggatgaactgccgaacgcctgggccagcggctgtttgtaatcgtcaatccggcgcatgaccgctgccggtgagagcccctgagcgtcaagccgttcggccagcctgcgcagcgcgccgattttggtggcgttgcgataggccgcatcactgcccaaatgggtggcgcaaaattgatcgcagcggtcgcgcaacgcgtcggataacgtcagatgctgcatggcggcggaggcggcctgcagcgccaggcgggtctcgcggctgaccgccagtcgaaacagcggcgggatggcgaattttttgaaatcaaacgcggcgtcgtcgatctggcgaccgcggatcggcgcggccgcatcgctccacggcatcggcggcggggcgtcgaacagcgccgaccaggcggcgccgttggacagatcgatacgatcgatgccgggcagtgcgcagccgatgccgaccagcgccagcggcgcggcatgaatttcctggttcatcgcgcgttcacctcggacaaacgtcctctgtccaccttgccgttggcattggtgggcagactgtcggcgaccaccagttggctggggagcatataggcgggcagcctgggctgcaggaactgcttgagctccagcaggttggggcggagcgcgccgggatggagggtgatcacggcgatcagtttttgcttcagctcgccgagctcgacatacagtgcggcctggctgaccgagggatggtgatgaaggatcgattcaatctcacccaattccacccggtagccgttgattttcaccatgtcgtccagccggccgcggtagaccagcccattcgccgtcgtctccacccagtcgccggtcgcgtgacattggcgcggatgccattgcgcttgccgcgatgaggcgacgttgctgtagccgggggtcacgcacggcccgccgatcagcaattctccgcgtcggcccggcgtaccgtcaatcggctgcaggcgcccctgttcatcgaccaactgcgccgtcaagccgggcaacggatggccgatggggatctgctccagcgtcgccaactgcgttcgatccagcgcgtaggcggtgcagacattggtttccgtcgggccataccagttgctgacgcggcaccgggccggcagatgcgcaaccagacgcctcagcgcggcggccggataaggctcaccggcgaacgtgacctggcgcagcgttttcaccgtcgatggcgccagcaacgcgctcttttccagcatggctaaaatcgaaggcacgctgtaccacagagtgacgccgtgcgtttgcaatccgcgaacgagagcctggcaatctttctgttcatcttcgcgcacgatccaggtcgcggcgccggcgcaaacgccggcgaacagatcgaaggtgctcagatcaaaggcgaaactggcatgattggccagcacgtcgcgcgccgtcagttgtgtatcgctgacggcccagccgatgaaaaacgtcagcatgtcatgggtgatttgcacccctttcggggtgcctgtggagcctgaagtatagagaatggcggcgaggggggagccgagcgcggcgatcgcttccggccaggcgccatcgagatcggtgcggccatcgagcgcgttcaaccagccctcatcgacgatcagcgcgggtgaggcggcggcgataatgcgttcgatgcgcgccgtcggttggctgaaatcgatagggacatagtggttgccgctcagccaacatgcgtacatggcggcgacggcgtcgggccctttctgcaggttgagcagcacggcctgctgctttaacccggcatgtcgcagcgccgccgccatcatgcaggcgcgatcggccaggcgacgatagctccagcgccgatcgccgcacagcagagcggtgctttccggcgcttggcgggcgtgccggaacagggcctccagtatcggtgaaatgaaggttgccatgatgtcagacctcggcggcgcgtgcgcgctcttcccgtcggacatcgccgttgaccggcacgccggtctccagcgccgccgccaccaaaatggcgtaggcttcatccagatcttcacgcgtgtgttcactggtcacgctgatgcgtaagcgggcgtcacccacgctgacgcccgggaagaccacggtctggcagaatagcccgcgcgcccggacggcgcggccgaacagcagcgttttggcgtcgtcgcccaccaccaccggaatgatggccgagtcggaatgctcaaggtcaaaaccggcgttaagcagcagcgtgcggaagtagtagatgttgtcccacagcttggccagtcgctcgggttcacgcagcatcacgtcgatggaggcgatcacgccggcggcgactgcggcggggatggtggcggcgaaaacataggagttggagtagaaacgcaggtattcgaccacttcgccatcggcgcaaacgaagccgcctaaccccgacagcgccttgctcatggtgcccagctcgagatccacccggcctttcatattgaagtgttccgccgtgcctgagccggttttgcccaagacgccggtcgcgtgcgcgtcgtcgaccaatacgcgtgcgccgtagcgttcggccagcttcatcaggcgcggcagatcgacgatatcgccgtgcatgctgaaaacgccatcggtgacgatcagcttgccgccggggtgatcggcgtatttggccagcgatttctcaaggctggtcaaagagtggtcataaattttccgctgcgcgcccgccaacttgcagccgtcctggatgctcatgtggttgatggcgtcggtgaacaccaggtcgtgtcggctggtcagagccgagatgcatcccaggttggccgagtagccggacggatagacgatgcagtcttcgcgccctttgagcttggccagtttgcgctccaattccagatgcagcacgttgctgccggcgatgatgcggcacccggtattggtggcgccgtacaggccggcggcgtcctggatggcgtggatcacttccggatggttcgacaatcccagatagctgttggagccgaacatcagaaattcgcggcttttgccggtgacctcgtcgaacatgaccgcgcggtttttgcacggcgtttcaagcggcatgccgtaccagtaaagctgacgctgttttttatcgcgataaaaagcgccaaactcacgcgttttatggaacaaatccgggtgctcgatgccgacgaagtcccgcatggtgcgcggatcgccgagctcatcgcgcgcgtccggcgacgcgggcgctttggtgggctgcggcgcagcggacgcggcggtgtgttggccaaagcggctgaaccacgcttcgccctgttcctgaagcagccgcgccgccaggttgtgctccagctcagccaacgtgcggcactccgccagcgctgcgttatcgtccaggcccagcgttttgagcagctcgttgcgcgccatcaccaccgcgacggagtcgatgcccaggtcgccttcgatggcggcgtcgggggacagatcacgcacttcatatccgctgtgggtgacgaacacctggcgcacgagagcgctcaaccaggcctgaggcgtctcgggggcaggttgcgcggcggcgttcggcgtcggcagcgtgaaaccgcgctgcaaaataccgtcgagcgcatcctgaatggttttgatctcctggatctccagcggcgtatttaattgaaactgacggttcagcaccatggcaatttccgccagcgcgatggagtcgacgcccaaatcgttttccagatggctggtcagggccagtgccgacggttcatactcggtcagccgggcgaaggtgtgcagcaccgactgccggacggcttcatgcgcgtttgcggcgctatcgacggcgtgaacgctcatgcgacaccccctgcggcgacttgcgcttgcaaccgttgcaccagcgcgaccatcgcctgcaccgaggcgaaattcgccggatggatctcatgcatgccgatggcgacatgagactcctgacgcagaaaatccaccagatcgaaaatggaggcggaatcgacgacgttcagttcaaacagcggggtttgagcgttcaggccgtcgtgatcgccatccagatactgggtggcgatatgctggatcaatttgctttctaacattgcgagctcccgttgctaactggttatttttcgccgacgatcagggtacgtgggccggcaattttcatgatgcgcgcgttgctgaaccccgccagacggaatctgtccaggtattcctgcgcgctgctctctatgccaccgtcggtggagaccagcatgttcagcgacagcagggcggtaaattccggccctgatttgtcttcgttcagcggcgtttcggaagcgatgaagcggccgccggccggcatcgcccgatagatgttgcgcaggatggtcagttgggtttccggggcgtagtcgtgcagcatccatcccaggtggatcaggtcatagccgccgatcggcagatcgccgctgatgacatcgccctccacgacgtcaatgcgttcgccatagccttgcagcgtcagcttgtcgcgcaaaaacgccgaggcctgcggcagttcgcagatcgccagtgcgatccccggataagcgtcggcgatcgccatcggcaggctgccgatcccgctgccgatatccaaaaacgcacggtgttgcgagaagtcgtaatcgcgaacaaagccggcgataaagggcgcggcgaatttaccgagaaactcctggaagtccgccacgtcgtccggattttggtacaggatgtcgaaccaactgcggtcatcgccgaataccgtgcggcgctggtgggcatcgtttcgcaccgccgttttcagctcgccccacagcggatacaggaaggtatcgatgtggcggcccagccatcccagccactgcggttcgtcgctcaacagaaaagcctggtgggcggcgggcagatgataaaggccgtctcgttggtcgagataccccatggcccgcagcgcgatgagcaactgctcggtcgaacgcgccgggcagtcaagccgcgcggcgatgtgcgccgcgtcggcgtcccgatcgcgcagctgatcgaacagcttcagcgccagcgcggcggtcagcgccttggcctggaaaaagcccatcatctgattgacggcatcttgcttggttaaaggcattgctggctccctagtctaaaaaggtggagagttcctcgcacaccgtggcaaaggcgccgacgaaacggtcgatctcggctttgctgatgatgagcgggggttgaatacggatcaccgtcgagctgttggcggtaatgaaggtcaggatcttgtggtcctggcacagcttggtgacgaatttcatgcagaacatttcgccgagcgcctgttccatgcgatccatcgccgcccgcagatgggcttgcaccggatcgggcaagaatttccaggtggtgtgccaatcgcccggcagccgggtggcgaattcgcgggcggaggcgttgaccgcgccggtgaacgcctggtcgaactggatccccagcatcaggccgcggccgcgcacctcgctgacgaacggatagcgggcggcgatctcactcagtgcctgcttaaagtaggcgcccatccgttcggcatggccgaccaaatcctgcgccaggatctcgcgcagcgcgctgagggcgacgaccgaggcgaggttgccgccgccgtaggtggagctgtgcaccaggaagcgatccgccgtgccataggctttttgccaaagatcggctcggcacagcgtggcgccgatggggatcaggccgccggacagggatttcgacagcatcagcacgtccggctcgataccgtcccattcgcaggcgaaaagtttgccggtgcgcccaagcccggtttgcacttcgtccaccatcagcagcacgccggtctcgcggcagagctgctgcaccgcctgcaggtaaccggcgggcgggatatgcacgccgccttcgccctggatcggttcgatcatcagcgcgccgacgtcttcacggttcagcgcttcccgcagcgcggcgagatcgccgaacggcacttccaccatcgcgtccagcagcggtgtgaaatagcggcggtgtttgtctcgtccggtgatggacaacgcgcccagcgttttaccgtggtaactgttgcgcagataggcgatgcccggcttgcccgtcgaggccttggcgatcttcatcgcggcctcgacggcttcggtgccggagttgctgaagaacacccggcccatgttgcccggcgccagacgacagagcacttcggccagcttggcggtctgttcgggaatggaaatgtattgaatgaagttggggccttgagcgtcgaggtagtttttcagcgcgttgaccactggctgcgggttgtggcccaggtttaggcacccgtagcccgccaccatgtccaggaaagcctcgcccgcatcgtcatacaactgggtgccggcggcgctgcggaaaacgttgtcgcagcgctgcaacttgaggaagtccaccatcatggggttgatgtattgatgatagcggtcgagggtgtcttccctggccggcgtttgggcgatgaccgcgtcgataaacgccaggcgcgatgcgggcaacgccgcatcagccgattccccggcatagatgtcatggtggtagtagcgcttgagattggtcacgctctgccgatcgatgcgctcgccgtacgaggccagcggataggcgaagaacccgtggcgctcggcgatttcaccgatctccagcactttttccggcgccagatagcggcccagcgaaaagttttcccgccggttttccagcgccagcacaatggtttccgccatgcagccgttcaattgttgcttgatggtgacgttgagcgattctccacccaacttgaccgcatcggtggcggtgacgcagccgccgtcgatgatcagaatgtcatcccgcgccgggcgcgtttccgaagcgatatcgcgcggcagcgccacgtcgatgaagatcgagccgggttgcagtctggcggggtcgatcacgccgccggcggaggtcgcggcggcaaacagtttgcagcgcgggtagagatcttcgggatcgctggtcagggtgacgcgcgagtgatactcctcgggcaaatggctgagcagttcgctgcgatcatggttgccggcgcggtgcagcaaatggagagagaaaccgtgcgccagcagcagacggcttagcgccaggcagatcgatcccggatagccgacgatggcgacgggttcctcctccgggcggatttccagccaggactggatctgcatcaaggccttgtagccggcgtaggtggtcagcgagttgccggaggtgaccggcaccggcgacttttccgcagtggcttcgccgcgtcgcccaacgatagaggtaaaaccgccgagaccgaccagttcggcgccatcgccggccagctcttcgatgccttggaccaccctggcggcgataccgcgtgcgtcggccagcatttcatccgccaccagcggcatgtatttgatcaccccttcgcaagtggcgccggtcgccgaggtgatcctggcgaagttcataaagggaaccaggttttgtcgttcccacagttcacgcgtatagccgctgtgctgctcggtcgagttgcgttgcagcagatcgagcattttgacgtaacgtttcaaccccagcgaggtgggatgagcgatgaatccgaatttcatgaggtggcttcctgtgtaggatcttggtcgaaggcggtgctggtcgattcgggctgttgggccgcccaggctttgcgctcctgcagggcgtcgtggtcgctcggatcgcgctgccagcctttggcggtggccagcgagataccgtcgccttcattgttgtgccccagcaccacggagaacagattgagtcggtgcggcgtggtcagcgcctggcgaatgacgtcttcgtcgaaatgcgtaagcgttttgctctggatatggaagttattgaccgtttgttcgacgtccggctgttcgacgttcaccaaccgcatttgccgtgaggtgcggttgaacagaatgcgttcctgataggtattgatgacggacagcccgccgttgcataaatagaagacggtgatgcttttattcagcaactgtggatgggtaagaatgttgtcgataaaagccggcaggatgtccggtacgatccctttagcgccgtcgccgataaacgccatcacgtggcttgggctggtgtaagccaggtagccggtggccagcagagcgtcgcccatcagggcgcggccataccagccggaaaagccgcggcgcgttttggcgacgttgcgcgcggcggagatgccgcaccggccgacgtcatatacgccggtaaaatcgaacccctccgtttcgatcagctcttcaatcactcggttcaactggcagaagaagtagttggccgacatgggcagactgggaagctggctgaccacgtcggaaggcgaatcgagataggcggcgatcagcgcgcggcgtctttctcgcaatgccggatcgacgtcgagatgcgctttcaccgtgcgcaggaacgccagacagttcatgtgcaggtgcagatcggcatagggcgacagatggcgctcatcgtgcgtaagctgcaccaggtgaaccttgcgctccagcctgccgtcggagaagggggtggtgatctgagcgacgcggcttttgatcataaacaggctctgctcgttcatggcgttgagcttgtcgttggtgtgcaggaagttgtagacgcgcgggctgtagccgtaaatcgccagggtgcccaggtagtggggattgcgccgaccctgataatatttcggcgccgagcctggatgggccaacgagtccaccagggcgatgccggcggcgtcggcgatgtcatggatcagggcgtattcgtcgtcgctgaccgggcccaactgccacaccagccgttccggcccgcggttgatcagcgctatcgcctgggccaggctttcgctcatcggcagcggatcgtccgccgacagaaccgggatcggcgagggatcgcagacggcgccctccagcgacagggtcgactccagcacgttttgcgtcgccagaatcaccaccggcccctggccttgatgataaaggcggaaggcttccgtcaaaccggtgccgatcgtttcgacgtcatcgatataaacgaacgggatgcggcgggcgacgagcacttcacgcatgtcttccgtcggcgtcagcgttccctggaagctgtaccattgattgccgcggttttccgccgcgacgatgatgccctgggcggcggtttccttgaggttggccagcgtccccttgaattcatccatcattccggaggtcactacgccgaggaacggcatgcgatacagctgccagttggccatggcgccgcaggcgatggcgtgttcgttagggccgcgcaggatcagcgcgccgcgcgcctccgcatgccgatccagatagccgatcagattggagatgatcgacccggtgtaataggacaccagccagcgttcggcggcggtacgctcgaaaaattgaatcaactgctcacccagcgtgttgtgcagcgccagcgcgccgatcggcttgacccggcggttggtgtagttcatctcgaagaagtccatccacaggcacaacagctcggtttggaagatcgccggatcttcgctgcgcacgatttcgcggtattgctgcggcaggtagcggaagggcgatcgcagctggcgaatgaacgcaacggtggagaaggtggtgtaaaacgcgggaatgccgctgcgctgcaaggcgctgtaaaaggcgtccagatcgcgatcgatctgttcgatgctgtcatcgacgccggccggcgtggtctgatcgtagaacagcatgcccaaatgaaattcgggacgctgttccagcgcatgggtatagatgatcttgccggtggcttcggccaggctggcgcattggatgatgcgaacgttgatagccttgttttggcctttgagaaagtgcagcgccttttcgcgcgcggcctgataaagcgagtccgccgccagatccaacagtttcagcggcatctcggactggatatgcacgcggttgaaaacataatcgcggatatcgttcagtacgctgagcccggtttggaaaaacgccgggttgcgcgtcaccaccaccacgccgaccgtcagagtgtcgggatctgcgtcggtgcggcaggcctggcgctccgcttgccacacttgctcgtaggcggcggagttggtgagtcttgcttgtcctgtcagggtcgtcatgatgagttccttgtgcagccaaaatggagtgacggcttcagcctggcgggcaaattcggcacgacaaagcccgcgacggtctctgcaggcggcggttgccgcgcgcatcaccttcgttgaattgtgctgttttcaggcggatggtttaccttcgccggatgtggtgctgactagccatcggcacgttctccgcgttgaataatgaccgtcccgctgtcgccgtcgagaatcaaggtgtcgccgctgttgatcagctgggtggcgttcttgagattgaccgccgcggggatgccgaattcgcgtgcgacgatgcagctgtgggacagcgcggagccgatatcggtgacgatgcccgccgccagcgcgaagagcggggtccagctggcgtcggtaaagcgcgccaccaggatttcgttgggctgcagctcgccggcctgcgccagcagatcggtgatgacgcgcgccttcgccaccactttgccggggctggccgccaggccggacagcatgccggcggcgttttccgccgtgggggctttcatcctgggctgataccccccgacgatcgccatcggcggctcttccgcatgcaggttcagcagatgctggtggcgattgcgctcgatcagatcggcggcgaacgcctcctgcgccgactgttcccccgccataaacgcgcggaagcgctcgaagtccacatagggcagatcggcctgtttgaccaggccttgcgcctccaggcgccgcagcacttccaacatgatgcggcggtagaaccaggtttcggtgacgaaggttggccgggtcgcttcgcggcgttcggccatcacgccatacagcttggtgatgaacttcagcttcatccggccaaaccagggcatcgctttaagcagcgtcgcgctgtcttcatggcgcagccgctctgtttcccgcagtttcgtgtgcagatccaccggatgttgcagatacattttcatcacttgcagcaggtagctgggatcgtcgttccagcgcggaagactcaattcgaactcctggcggccacgggcgccgaactcgaacaggaaggcgctgaagtcgctttgccagaaggcgcgcgattcgggatcggtgggcaggacggtgaccagttcctgtgcgctgtgtcgctcgaacacggccttcaacgccggttgacgattgaccgtctccaccaggctgagaatgcccagcgtgacttcgatggtgcgcaggttgttcatcgacgccttgatgcgattttgcaatccgttgccgcggcctttgaggtaacgttcgcaggtcagcgccagcgcatcgtagagcgcgaacgactgaaggaagaagggcatataggcggcgcagctgtcgaggaagtaaccgtcgatgcggctgagttcccgctccagctcctgatgcgtcatggtggtcagatccagcgccagaaagcggcgcgtctcgcgctggcgcagggcgatcatggcatcgacggtcgcgccggcgctgcgcaggttatgcctctgctgtttcagccaatgccaggcgctcttgagataggcccatccctgtacgccggggccataggggtttttgtacccgctgaaatcgatatcggcggtggcgtagcgggtcgtgaacttcatttcgtcgcgggtgggcgggcattggcggagcatgtaggccgatccggagatattcagatagacgtagccttgcaaataccccatataaatctgccaatcgccgatatccgccagccccatggttttgatcgccgggccatgaatatgcttttggtagaactggcaaaacgacagccccagcggcgtcatcaagccggtgacgatctcgccggtgtccattcgggagaaaaaggcccgttccttgatcgccggatcgctttcccacgggttagcgtaaagcatctgaaccggtttggcctgcgtggtgatcggccgcgcctgcaggagccacacgcgatcgtctttcaccgcccattcgatatccagttccgcgccgtaaatcatccgcgtttgcctggccagcctggcaagctgttgcagctgttccggggttaggctgggggcgtctcgcctgacttcaggcgtttgcagcagcgtgacccgtccctgcggatcgcgttggcaatagtgcggtttgtgacgaatttgccgctcgcggatctcgccgctcgccttatccaaaatgaagctgtcggtggtgacctgtccggagaccacgccttcccccagcccccagcagctgtcgatgacgatgtggttggcatcgcctgtcagcggatcttgggtaaacatgacgccggcggcgtctgcatccaccatgatttgcaagacgacggcgatatcgctctgcgccgccgatgtccggctatactgggcggcgcgttccgcccagagcgacgcccagcaggattgcaccttgcgcaccacctcgtcatccccgcgcacgtgcaggtaagtgtcgtattgcccggcgaaagagtgggtcaggccgtcttcttccagcgccgaagagcgcacggcgagcgaggcgccgtcgcccaactgtttgcaggcgtgacggatcgccagatcgagcggggcggggatggcggtgctcaaaatcatatcgcgcacgttgcccggcgcgcccgtgtcgagcagcgctcccggcacggcgaattcgataaactgccggtaagcctgcgcggtgatgcaaaacgccggcggcaccggcaagcccgcctgaatcaaatgattcaacgaatgggctttgccgcccaggcgatggggttccagcgttttatcgccggaaagttcaaccaccagggtaggattcatgacatcacctccgcaggcgtaacgggcattgcgaggcgttctctcaccgctttggcggcgttcagcccggctaacaccgcgctttcgatattaccgatgcccacgctgtcctgattggcgaagtgaatattctcaaacggcatgctggcctggtgaaacacgccctgagcctgttgtccggcgaccgaggtcaccagacccgcgggccagaaccagatttgaatgtcttcaatgatgtcggcgtcaatgcccatgttgcccagcactttggcgatttcgacataggtctgttgctgcagcgccgggaactcgttctgcgcggtgcgaccttgccgctctgggcgagtggtcggtttgagcagggttaataccccggtttccgcgctgaggtgattgtccatccaattggcgatcaggcaggtgccggctttgctccaatagtaaggtgtgcgggtgttttccggctcgatcagatagccgccgaacgagtgttcgaggatcggctttttcaacagcacgttcgccaggtagtaatcttcatggcggatctgacggatcgccgccaattgctctttgggcagggtgggtaaccaggtgggcacatgcgttttgggggctgcccagatcacttgtttggctctgatttcgctggccgcgccattgacgctgaaccggatcaccgtttcgtcgccgccgggcgtgatgctttgaagctgtacgcggctttgcagcctgacgttgttttgctcctcaagatagtcgagcagaccggcgctgatgctgccgttaccgcccggcagcgtgaccagattgccgcgtaaataccccaccaggaagtgcaatccgacataggcggagacttcgcgaatatcgagacattccacgcgcagcgtggtgctgacggcattctctaccagcttgccgaattttctcggtggccgcagatccgccgggatctgatccagtttgtgcggttcgaacagataagtgtacagcgggatagtgtcgagcagcgccatattcgccttgctccaggcgctctgcggcgtccagggcaggctggggtaccgctcgccgcgcggcgagaaggtatcgaggaaggcgtacagatcggcaaagatcggatcgcccagctgttttgccgcgataacataaggtttaccgatcaaggcatgcaggaatagttgtcccgtcaggcgccagacggcgggtttcagcaggtagaccggctgtttgagaaaaccaacgacgacttcacccaggcatcggagcagcaagaaggtatcgaaaaacaccagcgtgtccttttcattggacttgtaggcgccgctcagaccgattttcttcagcagttgcaacatgaacgaacccggcaatggctcctggaagcagacgccggcgatgggaaacttcaggcgattcaccgcgcggtagcgcgcgttgccgccaaaggaagcgcttttttccagcaccagaacccggcgttcggtcagttcgctggccgcggccaaaccggagacgccgccgccgatgatcaccacgtcatactcgccgtccagcgtgggggttaccgagccggctgacgccggcgtgggcgtggaaaagtcgcgcgtggggaacgtgcgtggcttgggtttgcggtggtgttgctgccgcagcatgtacagcgccgccagcgcgaaaatcgcatcgagcaatatgacctgcggctgggcgcggtgcaggatcgtgacaaatcccgccatcatcagcaactggcagtagatgatcaatgtcgtccaacgcgggttgaacatcaagaccgcaccggaggcaaacagcgccacgccgatcagcgcgttaaccgctgtaccctgcgccgccagccaagccgtcgccccggcgtaccaggtgccctggttcgccacggccgcctgctgcagaatatcggcgacgttttccaactgagggaaggctttcgccaggccggccaacatatagagcacggcaaaaacgcgttgaacgatcatcatgcgcctccccgcagacccagcttgcgggcgacaatttctttttgtatctcgttggtgccggagaagatccggctggggatcacgttcagcaagtggcgcaccagaccgagttcttgatccatgccggctccgccgaagatttgaatcgcgtccagcgcggactgcacggcatattcggaaatcaacagtttgctcatggcgatgtcgatctcggcatcctggccccgatcgtgtttccaacaggcgcggtagagcattagccgacactgttccagacgcagtttcatctcgatgatgcggttggagacggactgaaattggccaatcgctttgccgaattgtcggcgttgtttggcatagtccagcgcgctgtcgaacacgcgctccattgcgccgataaacagagccgacaggcagcctttttcccagatcattgaatcgtggaagatggcgccgccggcgcccggcatgccgagccgttgggcctctggaatgaagacgtcgttgaaggtcagttcgctccacgggcagttggagaggcaatctttcgggctgacggcgcctacgtttaagcctggcatccctttctcgagcacaaatgcggacacgcccataaagccatgttcgggatgggttttcgcatagacgatgaagatgtcggcaatcggcgcgttggtgatgaaaattttgtttccgttgagccggtagccgccttcacagggttgagcggttgatttcatggcataaatatcggaaccggcgtccggctccgtcgccgcattcgccgcgatcagttttccggccgccaacgcttcgagatactgcgcttttaatgcttcggaaccgaagcgggaaagcgggatcacgcaggcgcacagatgggcgcagagcgaaaaggacatgccgatgtcgcggctgcctttacccagcgcttcaatcatcagcgcagtatcgagcgcgctcatgcccaatccgccgaacgcggtcgtcacgggggctcgggtaaaaccataggcggcggcttgtcgccacaaatccaggcttaatacctgccgtgaaagccgatcatgcgcatcctgatccagcacctcgcgggcaaaacgctgagcggattcgcttagagcctgctgctcgcttgataagttaaaatccatgacgaactccgccatcgggttgagagattaaattagctaatatttctagtttggaggtggccaaaactcaaacaggcgcagtaatggcaaatgtaaataaatgtttatttatgtggtctattattacaattttgttaatttgtgtttttattttgttgttttaattgtgttttattttgtgttatttatacacaaaaatttacatataataaaaatcttaatttgatcaaattttaataggttagattgtctattgttttttgatgaatactttgcaggtgaagtatctatcttttggctgtggctatcggtttctcatcgctatcgacggtagggcgttgaggcttggtgagtggcggaaagcgtcttaagatagaaggtgagcaggagcattccggaggaaaaaatgaatattagcgacgtcgcgaaaaagaccgggttaaccagcaagacgattcgtttttacgaagagaaagcgctgattaccgccccgatccgcagcgataacggttatcgccattattccgccaggcacgttgaagagctgacgctgctgcgccaggcgcggcaggtgggcttcaacctggacgagtgccgtgagctggtggcgttgttcaacgatccggcccgccacagcgccgacgtgaaggcgcgcacgctgcagaaggtggcggagatcgaaaggcacatcagcgaactgggagaaatgcgccaacgcctgttgacgctggcggaacaatgtccgggcgacgagggggccgagtgccccatcatcaataatctggcgggatgctgtcgttcgaattaacggctgatggcgcggatcaccagcgtgaccccttccaccgccaccacttccacttcggtaccggcgggcagatcttccgccgcttgcgcgcgccagctgctgtcgccgatattgatgcggcccatgccgttgtgcatcggttccgtcagcgtggcgcgggtgccgatcagctgacggttgcgctggttgagcaccggtgaaccgccggacgcggccgccgggcgccggcgcagccagtaccaccacaggtaggcgacgacgacggtcaggacggcgaagatcacgccttgccattcccaggtgagcgtcggcagcagccagatcaaggcgccgaccaacagcgccgccacgccgctccacagcaggtagccgccggcgccgagcatttccgccgccagcaacacgcccccgagggagagccagaaccacagcggattcgccgcgatcagttcgagcatgattatttgcctttgctttctttcagcagttcggtaatgccgccgatcgagccgagcaggctgctggcgtccagcggcatcatcaccactttgctgttgttggaggaaccgatcttctgcagcgcgtcggtgtatttctgcgccacgaagtagttcaccgcctgaatgttgccgctggcgatggcgtcggacaccagctgggtggcgcgcgcctcggcctcggcggcgcgctcacgcgcttccgcctgcaggaacgccgactggcgttcgccctcggccttcaggatttgcgattgtttctcaccctcggcgcgcagaatggccgcctggcgcaccccttccgcctccaggatgtcggcgcgcttggttcgctcggccttcatctgggcgttcatcgaggcgatcagttccgccggtgggcgcacgtcgcggatctcgatacgggtgatcttcaccccccaagggttggtcgcttcatcgacgatgtgcagcaggcggctgttgatgctgtcgcgctgcgacagcatttcgtccagctccatcgagccgagcacggtgcggaagttggtcatggtgaggttgacgatcgcctgttcgaggttgctgacctcgtaggcggcgcgcgccggatcgaccacctggataaagcacaccgcatcgatggccacgttggcgttatcgcgggaaatcacttcctgcgaagggatgtccagcacctgctccatcatattgattttacggccgatgcggtccatgaacggcaccaccaggttcaggcccggcatcagcgttttggtgtagcggccgaagcgttctaccgtccattggaacccctgcggcacaattttgacgccggcgaacaccacaatcagcgcgacgacgatcacgatgggaataaaagtaagcatgcaaacctcctgtcagacatatgtaaacagatattacgccagcgcaggaaaaatgcctaccgataccgcgacttaatccagggcgctgaccaaacccgcgattaacggatcccgcgtctggaacaggctgatcagggtgcgcaccgcttcgccgccgcgagcatcggaccaggccagcgacaggggtgaaggttggcgcggatatctgagctgcttggccaccaattcgccgctatcaagataagtttggcacagctggcgcggaaggaaaccgatcccgagaccgcgcagatggcattccagcttggtgcgcagatccggcaccttgatctcctgctggccggacagcaaccaggcggtacgcttggccagatggcgcgcggtatcttcgacgttgattgcggcataagggcgcagctgcgtttcgttcaacggatcggcggcaacggccagcggatgcgtcggcgaaatggcgaacacccaatcgatcttgccgagcggcagcaccttgatgctgttttccagcgattcattgcccgccgcgccgatcgccagatggcaatcctcattcagcagcgcgtcccacacgcccatgtacacctggcgggaaatgtggaattgggtgaacgggtatttgtcgtgcaggtgagtcaacagcccggctacggcggcggcgtcgtacagcaggttgttgatcacgatattcacctgatgctctacgccatcgttgatttgccgcagttcgcccggcatggcgtccagccaggtgtgccactggcggcagcgctccagcaaatactccccggccggcgtcaggttgacggtgcgggtggtgcggataaacagctgcgtgccgatgctctcttccagcgttttaatgcggtagctgatggtggcggtggttttatgcagcaactctgccgcgcgcgagaagctttggcactcggcaactttgataaacgaacgaatggtttcgtgatccagcatgtggggtccttggctgacaccgccttttcggttatcggtgagaagaatctactgatgttgcgacacgataggcagcggcaaagcccaaccccacgatcccggtcacagaatcaccggatagcgatgagcatacgcagccctattcttgtcgatcgtggatcaggtgtttttttaattcattgatttcaagcaattaatatgggcttccgatcgtgaaatgtgcggacgatcttgttatggaaaaattttccaaaaaattgctgtcaaatttgccatgcgctgtctagagtgaaggcgttgggtgaaatatcgccgtttaatcgtcgtctgggtcatgcgctttggagaatcacatggatttagtcatcgaagaattaacgccggcggcctttgcgccttatggcgatgtattgcagatagaaggttcgcgtttctttcatatcaatgacggaaagaccgagcgttatcacgatctcgccaagattgaggtgtcggacggcaaccgggtgctggccagcatcaaccgggcggaaccctgcgagctgccgatgaccttttccctgctggaaaagcatccgctctcgtcgcaggcctttgtgccgatgaacggcgaacgcttcgtggtgatcgtcgccgaaccgggcgaaacgatccccgttggcacgttgcgcgcctttatcaccaacggcaaacaggggatcaactatcatcgtaacgtctggcatcacccgctgttcgcctatgcgaaagtcaccgactttttcaccatcgatcgtgcaggcgccgacaactgcgtagtcagccgcttgccggagccgtatcgcatagttttggcatagcgctggccgcacgccgcgcagggcgtttatcatagcgtcacccatgccgtcactgacaaaggaagcttgaatgaccgaattacgcaggaaaggacgacccgccaccgaagccggcgcgaccaaaggggcgcaggcgttggatcgcgggctggagatcctccagtatctggccaacgccgggggaagctcgtcggtttccgtgctgtccgaaaagctggagttgccgctgtccaccaccttcagattgttgaaagtgctggagaaatcggaattcgtctttcaggatccgcagctgggctggtggcatatcggcattcagtcgttcaccgtcggctccgcttacatgaacgatcgcgacgtggtatcggtagccgggccgttcatgcggcggctgatgctgttgtccggcgagaccgccaacctggcgatccgcaacaatttcgacgcggtgctgattcgccaatgcgaatgccaggcgatggtgcgcatgtgcgcgccgctgggcagccgcttgccgctgcacgcatcgggcgccggcaaggcgctgctgtatccgctggcggaagaagagatgctggatctgatcgtgcgttcggggctgcaatcctatacgccgaaaaccctgaccagcgtgaacctgctgcgcaaggatctgcatcagtcgctggagcagggctacaccatcgacgatgaagagcacgcgctgggcctgaactgcctggcttcggcgattttcgatcgcaacaacaacgtgatcgccgctatttccatttccgggcccagttcgcgggtcggcaaggagcggttcaaagagctgggtgaactggtgggggaagtggccagagatatcagcgccgcgctgggtgaatcgcgcagcaaggcgtaatcgtcgcgtgccggggtgagccggcgcggaacaagactccccgtttgatgagcagacgggtttttttgacggcatttcaaagttggaaaaattttccaataaattaaggagagcatcacatggcaattatgcgagcggtagacgcggcaatgcacgtgctggaaaaagaagggatcaccaccgcgttcggcgtgcccggcgcggcgattaacccgttctacgatgcgatgcggcgacacggcggcatcaaacactatctggcgcggcacgtggaaggggcctcgcacatggcggaaggttatacccgcgccgccgccggcaacatcggtgtgtgcatcggcacctccggcccggcgggcactgacatgatcaccggcctttactccgcctccgccgattcgattccgatcctgtgcattaccggccaggcgccgcgcgcgcgtttgcacaaggaagattttcaggcggtggacatcgagtcgatcgccaagccggtgaccaagatggcggtcaccgtgcaggaaccggcgctggtgccgcgggtgctacagcaggcgtttcacctgatgcgctccggccggccgggcccggtgctgatcgacctgcctttcgacgtgcagatggcggagatcgagttcgatccggacacctactcgtcgctgcccgcctataagccggcggccacccaggcgcagatcgacaaagcactggatctgttgtgcgcggcgaaaaagccgttgatcatcgccggcggcggcattcacaacgccgatgcggcggatctgctgcaacggctggcggagatctgcaatgtgccggtgatcccgacgctgatgggctggggcgccattccggacgatcacccgctgatggcgggcatggcgggcctgcaaacctcgcaccgctacggcaacgccaacctgctggactcggatctggtgttcggcatcggcaaccgctgggccaaccgccacaccggttcggtggataagtacaccgccgggcgcaaggtggtgcatattgatatcgagccgacgcagattggccgggtgatctgtccggacctgggcatcgtttccgacgcgcgcatcgcgctgcaaatgctggtggacacggcgcagcgccgtttcgaacgcggcgagttgccgaatcgcgacgcctggtgcgccgcctgcctgcagcgcaagcaaacgctgctgcgcaagacccatttcgacaacgtaccggtcaagccgcagcgggtgtatgaagagatgaaccgcgccttcggccgcgacgcctgctacgtcaccaccatcgggctgtcgcagatcgccgccgcacaaatgctgcacgttttcgaaccgcgtcactggatcaatgccggtcaggccggcccgctgggttggacgctgcctgcggcgctgggcgtatgcgccgccgatccgcagcgcaaggtggtcgcgctgtcgggcgactatgatttccagttcatgatcgaagagctggcggtcggcgcgcagttcaagctgccgtatatccatgtgctggtgaacaacgcctatctggggctgatccgtcaggcacagcgcgggttcgatatggattactgcgtgcagctgtcgtttgaaaacatcaacaacgcggaaattggcgagtacggcgtcgatcacgtcaaggtggcggaaggcctgggttgcaaggcgctgcgggtgttcaaaccggaagagatcgcgccggcgttccgtcaggcccaggaactgatgcggcagcaccgggtgccggtggtggtggaaatcatcctggagcgcgtcaccaatatttccatgggcaccgagctggataacgtcaacgagttcgagccggtggcggcaacgccggaagacgcgccgacctcggtcaacttctttgattaccgctgaggagccttaccatgccgaaattttcagccaacctgtcgatgctgttcactgaagtcgattttatgcagcgtttccgccgggcgaaggagcagggcttcagcgcggtggaatacatgttcccttacgactatccgatcgcggcgctgcgcagcgaactggaggcgcaccgtctgagccaggtgctgttcaacctgccggctggcgactgggcggccggcgaaaggggcatcgcctgcttgccggggcgcgaagcggagttccgcgacggcgtcgggcgcgcgatcgagtatgcgcaggccctgggctgcgatcgcatcaactgcctgatcggcaatccggatccagccgtcagccgccgcaccaccgacgaacgggtgaaggagaacctgagctacgccgccgacaccctggcgcggcaaaatattcgcctgctgatcgaaccgatcaaccgctacgacatgccgcagttctacctgcaaacctcccggcaggcgatcgaactgatcgaggcgatcggcagccccaacctgtatctgcagtacgacctctaccacatgcagcgcatggaaggagagctgacgcagaccctcgagcgcctgctggcgaggatcgaccacatccaggtcgccgataacccggggcggcacgagcccggcaccggcgaaatcaactgcgagtttatcttcgcgcagctggatcgcatggggtatcgcggctggatcggctgtgaatacaaaccgctcaccaccacggaaagcggcctgtcatggattaaaaaatacctgtcttgaggagatgaaaatgaaagtgggatttatcggtctgggcatcatgggcgcgccgatggcggaaaagctgctggcgggcgggcacacgctttacgcccacacccgacatgaggtgccggcaacgttactgcaacagggggccatcgcctgccgcgatccgcagcaggtggcggatgaggcggacgtgatcttcatcatggtgccggatacgccgcaggtggaagaggtgctgtttggtgaacgcggctgcgccgccggcaagctgaacggcaaagtagtggtggacatgagctccatttcaccgctggagaccaaagcgtttgcgcagcgcatcaaccagctgggcgcccagtacctggacgcgccggtttccggtggcgaagtgggcgccaaacagggcacgctgaccatcatggtgggcggcgagcaagcgaccttcgaacgggtgcaaccgctgctggcgctgatgggcaagaacatcacgttgatcggcggcaacggcgacgggcaaacctgcaaggtcgccaatcagatcatcgtggcgttgaccatcgaagcggtcagtgaagcgttggtgttcgcctcgcgcgccggcgccgatccggcccgggtgcgtgaagccctgatgggcggcttcgcctcgtcgcgcatcctcgaggtgcacggcgagcggatgatcaagcgggcgttcgcgccggggttccgcatctcgctgcaccagaaggatctcaatctggcgctgcagggcgcgaaggcgctggcgctcagcctgccgaataccgccacctgccaggagttgttcaacgtctgcgccgccaatggcgacggcgaactggatcactccgcgctggtgcgggcgctggaaatcatgggcaaccaccgggtagccggctaaggcgcccgccggcgtttcattcgccggcttatcattagaatcagagatgttcgacattaataacgccctctttatgataaataaagagggtccccgccaatccaataaaaaatgattcagcacaataaaaagtaaaaagcaggatgccaacccaaggagacactgaatatggcaaccgataatgctgttattgacaaagatattcttaccgcccctgacaaaaatcgtttatatcgaaaaatcgcctggcgcattatgcccattctactagtgagctatatcgtcggttatctcgatcgggtggggatttcgttttcgaaattccaaatgatgcccgatattctgaacggcaatgtctcgatggccgaagccgtttacgggctgggggccggggtatttttcatcggctatatcatcgccggggtgcccagcaatattctgctgagccgctacggcgccagaaagatcatcgcgctgctgatggtggtgtggggggcgatttcgatgctgagcatcttcatcaccaacccctggcaattctacctggcgcgttttctgctggggctggcggaagccggcttttaccccggcgtgatcctctacctgacgctgtggttcccctccagccagcgcgccaagatgacggcgctgttcgtgtgcggcatcccggtcagcaacatcatcggcggcccgctgtgcggctggatcatcgaacacatgaacggcctgatgaacctctccggctggcaatggctgttctttatcagcggcccgcgcgcgctgttgatcgccatcgtcattttttgcttcctggataatacctatcagagcgccaagtggctcagcccgcaggagaaggcgctgatcaaagaggatatggcgcagagcgcgccgcgtcagggcgccgccggcgggcaggagtggacgatgaaaagcatgctgaggtcgtccgcgttcaccaaaatgtggctgatttgcttctgtacggtgatggggcaaggcgggctggcgttttgggtgcccaccatcattcgcgacaccggcgtgacctcggtgatggatatcgggctgctgaccatgctgccgtatatgctggcggtggtggcgatgctggtggccgcgcgcagttcggacaagcatcgcgagcggcgctggcacattatcgtgccgttctgcatcgcggcggtgtcgctgatctttatcggcctgttcccggacaacaagcatgtggtgatggcggcgctgtgcgtggcggtggcctcgagcctggtgccgtcgccgctgttctggagcttgccgaatgccatctttaccggcacctgcgccgcagcgggcattgcgctcatcaattccatcgccaatatcggcggatttatttcgccttacatcatcggctatttcaaacagctgacccacagtaacttggcggcgatgtgcgttttgtcggcgatgatgatcgtgggcgcattattgacctacagcgtgccggcgaaatgggtcaataaataacgcttttcttcatcttaattaaacagtcggcaacagttttattttattccgccatgcgttcttcatctgattaattcagcgggggaaggcatggccgtttttatttccgttcgaataaaggatgcgtcatgaaaattgttattgcaccggattcatttaaagaaagcgtcagcgcggaattggcggcgcgggcgatcgcgcgcggctttcacgaggtttatcccgatgccgagtgcgtttgcctgccgatcgccgacggcggcgaaggcacggtggacgcgctggtggccgccaccggcgggcgcaaggtgagtgtgaccgccacgggcccgctgggggaacgggtggcggcgttttacggcgtcagcggcgacggcaagacggcggtgatcgagatggcggcggccagcggattgatgctgacgccggcggaacgccgtaacccgctgctggccaccagctacggcaccggcgaactgatcctgcatgcgctggatcagggcattcgccacctgatcctcggcatcggcggcagcgccacggtggatggcggcgtcggcatggtgcaggcgctgggcggccgcttttatcgtccggacggcagggcgctgccgtggggcggcggcgagctggcgacgctgagcggaatcgatctcggcgcgctggatgcgcgcctgcggcagtgccggatagaggtcgcctgcgacgtagacaatccgctggtggggccgcgcggcgcggcggcggtgttcgggccgcagaagggcgcgacggcagcgatggtggcgcagttggaacagggcctgacgcagtatgccgaggtgatccgccagagcaccggccgcgacgtgcgacaggtcgccggcggcggggcggcgggcggcatggggatcgcctgccaggtgtttctcggcgcaacgctgaagccgggcatcgagatcgtgatggcggcgctggggctggagctggcgttggcggaggccgatctgctggtcaccggcgaagggcgcatcgacagccaaacgctgggcggcaaggcgctgtccggcgtcgcccgtctggcgcgggcgcgcggcctgccggttatcgcattggccggcgtggtggaggaaggggcagaggcgctgcacgcgcaggggatcgacgcgatgttcagcattttgccgcgtctgagtacgctggaggttgcgctgtcgcaaggcgagcttaacctgcagcgcagcgccgccaacgtcgcccgcgcgatgcgcgtcggccagcgattgggataaaaaagaaggccacgctgcgcgggcaggtggcctgggttttggcggcgaagcgcttacggctcgacgtcgcggttgcaatccttggagtagatgtagctgaaggtttcctggcccaccgcatagcccgcctgctgcacataggcgcccatgaagatgtagtcgccttgcttcaccggcatccattcattgtccaggttgtacacgccggcgccgctgagaatataggcgccatgctcctgcacgtgggtctcgatatagccgtggctggcgccgggggcgaaggagaggatgtgcatattcatgtcgaagcccagatctttcggcagcagatcctgcaggatcacctcgctcatgccctcgtagtggatctgctccaggttggcgacgttgttgctgaccacgtgcgcctcgtagcccttgatgcgctggtagcggcgcttgtagaggaacaggcggctggattggccgccgttggcgttttccagccgcatcgtgacgcccgccgggcagtaaaggtagccgccggcgctcagcgggtaatcggtggcgtcggcggaagcggtgatggcgccgtcgatgacgtacacgaaggtttcgatctcttcgccgccaaagcctttggtgttgcggccgcagtcgtgcagcgtcaccagataatcgacgaaggtggcgcccagtttcggcgtcgacaagatggtgacgtcgcagttttcaaaaccgggaatgacgttgcgcaccaggccgttcggcgggatcagcgcatagttgccgcgtttgatgatggcgcgcgttgacagaatgtcggttggataaccggtttgattgttgaagtaacccacgttgattctcctgatcgttgaaagggcgccgcggcggcgcccggtaaaaaagcgccgtcaggcctcggtggccgttcgggttggcgtagtgcgtttcatcaagacattgacggtgaagaaaatggcggtgcccaccagcaggatggcggcggagatgtaaaagcccatcaccttggagccggtgctgtcggagatcacgccggtgaggaagggggcgatcaccgacgaggacatgccgaagaagttgaacacgccgaagctggtgccatagcctttcttcggcgcgttgtcggcgacgaaggagatcatgatcggatcgaccgccagcttacccaacagcccgtacaggatcaggctgatcagcagcatggtggagtccggcgaaatgacggtgcagaccagcattaccgccgcgcacagctcgaggaagatgatcagctgcaccttcttgttgcggaaacggtcggacatgcggctgaagaacagcgcgcccggcaccgacgcgaaggccaccagggcggaggagaagccgatggctaccccttcaaagccgcgctcttgctgcaggaacgagggcagccaggtgactatcatgtagtagccgtagcaggtggcgaagtacatcgcgtaggcggagatcatgcgcaggctgaacaggccgctggcctgaccgtcttcttcgggcgcgagcgccgccggcgcaacggtctggctgacggctgccggcgtttgaggctgcgagcctttgatgaccacggcgaacaccagcgtcatcaccaccagcaggccggtgatgatgaacagcatgatctgccagttcatgttgaagcttttcaccagcaggctggaggcgatcaggccgatggccatgccgagcgccgagccgctgttgatcaccgcggtcgccaggccacggcgctccagcgggatattctccgacgacagggagtaggccgagccgtaataagagccgcaacccatgcccgccagcaggctgccggcatagaccatggtcaggctggtggcgttgccgatcagcaaggtggcgatgatgaacaggcagaagcccgggatcaacaccaccttcttgccgaatttgtccaccaggatgcccgccgggatctgcatgccggtataggcgaagaagtagaagctggcgatcagccccatttccgcattggagtgcgcgccgatggtctgttggatctcgggaaagatcggcgtcagaacggtgcggtagatccagatcaccgcccagcccaggcagagcacgacgacgatctttttccagtagcgcgggtcgatgtcgttgctcatgcctcggccccctgttcggtgtaggccagctgatacagcgtctgcgccaggattttcaccccttcgttcagatcggcgacggcggttttttccgccgggttatggctgatgccggcgatgctcggcacgaacatcatcaccgtcggcacgcgcggggcgaaaatttgcgagtcgtgcccggcgccactgtgcatcatgcggtaattcagccgctgcgtttcacacaggcggctgacgcaggccaccagctgttcgttcatcgggatcggcgcttcgtccatccacagatcgatctcggcctcgatgcccatctcggcgcagatgcgctggatatcctgctcgatctcctgcgtgaagcgcagcagcgcggcctgatcggtatggcggcagtcgagggtgaagtgggtgaagcccggcaccacgttgacggtgttcggcttcggctccaccttgccgaaggtcagcaccagcggatcgccctcggcgcgcgccttggcgatcgattcgcagcagatgcggctgaaggcgtgcacggtatcccggcggtagctcatcggggtggtgccggcgtggttggcttcgccctgcagacgcacgtcatagcgccgttggccgacgatgctggtcaccacgccgatggttttgccttcggtttccagcactttgccctgctcgatatggatctcgacgaaggccgtgatatcactgcgcagcggctgatgcggcggcgggaaatcgaaaccggcgtcgcgcatggcgttgacgaaaccgacgcccttggcgtccgtaatgtgctgcacatcttcccgccgggccaggccgacgatgttcttgctgccccagaacacataggggaagcggctgccttcttcttccgccagcgcgatgacttccagactgcgcagcggcgggccgtaggtatccttgaggtatttgatcgccataaaggcggcttcaatgccgaactggccgtcgaggttgccgccgttgaccaccgtatcgatgtgcgaaccggagagaattacctggtcggggtatttgctgccctccagccgcccgaacaggttgccgaccgcatcaaaatgggtgctcagcccggcggcgtcgaaggcgtttttcaacgcgtgctgcgcctcgatccattccggggtataaagcagacgcgtcatgccgccgctggggtcggcgccgattttcgataaccagccggaaatatcacggatttcttgttggaagtctttcatgtttacctgcccgcatgttatgtctcagcggcgatgcggccagggcggatgatattcgccgccggccgacctattgcgctgagcgcgctgatgaaggttttcttttttctccccggctctgaaatatcaaccgcgagccgcggcgtaaaaagcccacgataataagattgcgttaactggcgaaggggtctttgtgatcgtaagaacgctggtaaatagcatttgaaattaagtattgataaatatcgtcgacgatttcgataccgtttttctcgctttccatttcacgcgcatggctgttctgtcccgggtaaagcactttactgacgcccggcgccggtttaacggcgttcaactctttcatgacctggctgatatttttacggaacgccgattcgttggtgaaataacctgggttcaggacgatatgcaattggcccaattcccggccggcgctaagatcgtgatacatcgagctgacgtgtttgccgaacggcaggccgagcaaaatgcccgacagcacgtcgaccatcatcatcaggccgtagcctttcggcccggcgatcggcagcagcccgctgacggcgaacggatcggtggtgtgcttgccctcggcgtccaccgcccaggtgtcgggaatggcggcgttgcgcgagcgggcgtccagcactttcccccaggcctgcacggtggtggccatatcgaaggtaatcagctcgtcgccttcgcctggtgcggagaaggcgatagggttggtgccgtagtagacttcggcgccgccgtacggcaccaccatcggatcggattggcacagcgagatgccgaccatgccggcgcgcgccgcctgctgcacgaagtacgacagcgcgccgctgtggccgatgcggcgaacgcccaccaccgcaacgccgttctctttcgccatctcgatggcgcgatccatgctcagcttggccgccacgtgcccggcgccgttgtcgccgtcgaaaatggcgctgcaggggccggttttttcaaaggtgaaatggggatgattgttggtgccgcccttgctgatgcgttcggaatagtattcgaccctgaccgcgccgtgggagtggatgccgcgcgcatcggcatgaaccagcacgtcggcgacgatgccggcgtgctcctggctcaggccggcggcgtgaattttttgctggataagctgatgcaattgttgtttagagaccttcatatacagtccttttatcactacggtttatttaattcgcctctgcgttgtaatgtataaataccgggggggaataatgtgatccagatgcgttttattctattgaattaaaaattcgtcgaattaaatcgtcattgttagaagttttttataaatgattttctcacgtctggattaactaatattcagacgattaagttattttttctaacaatgaataaagtgtgaccgcactcacctctgggcgtgattttaatttgtagcttgataattaaccttttcgctggattcaatgcatcgccgcgccgccggtgcgggaaatattgccgatattattaaatgctgtcgtaaggatatcaccatgatccatgcttttattaaaaaggggagctttcaggattccgtcagcctgatgttgatctcccgcaaactcagtgagtctcccaaggttgaggaaatatccgtcatgatggggacgccggccaataaatccttattggaggtgaccggtttctggcatccgcagtttagccaagcgacgccgaacgatatttgcgtggcgatcaaagcggagtccgccgacgagtcgatcgccgaggagatcggcgcggcgctggaggcggcgctcaaggcgattgcgcagggcggccagggcggtaaaaaactgctgcgggcgcgcagctggcgcaccgcccggcagaagctgccggccgccaatctggcactgatctcgatcgccggcgaatacgcggcggagttggcggatcgggcgctggaagacggctgcaacgtgatgatgttctccgacaacgtcagcccggcgcaggaagtggcgctgaaaaccaaggcgcgcgagcgtgggctgatcgtgatggggccggactgcggcactgcctgcatcgccggcgcgccgctggcgttcgccaacgtggcgcccgccggatccatcggcgtggtcggcgcctccggtaccggcattcaggagctgatctcgcaaattaccctggcgggacagggcatctcgcacgctatcggcctgggcgggcgggatctgacggcggagatcggcggcatcagcgccatcagcgcgctacgcatgctggcggcggatccgcagagccaggtgctggcgttcgtgtccaaaccgccggcgcccgaggtgcgtcagcgggtgatcgacgaaatgaaagcgctcggcaagccggtggtggcgctgttcctcggcgcgcagtccgccgtgcgtcaggatggcaacatcacgttcgccgccacgctggatgaagcggcgcggctggcggcgatgctgggctgcgtgcagcaacaggcggcgcaacagcccgcggtgcccggcggcaaaatcgccggactgtacgccggcggcacgctggcggccgaatgcgcgatgttgctggcggaaaaactgcgcttgccggtggatagcgaacacccgcgcggcgccatgctggtggccgacggccatcgcatcatcgacatgggcgatgacttttatacccaggggcgcccgcacccgatgattgatccgaccgcccgcaatcaagagatcgcccgcctggcgcagcagccgcagaccggcgtgttgctgctggacgtggtgatcggctttggcgcccaggacgatccggcggcgtcgctggcggacgaggtggccaacgtgcgcgcggcgcgcggtgcggcccacccgctggcggcgatcgctaccgtcaccggcaccgaacaggatccgcagcagcgctcgcggcaaatcgccaccctgcaggaggccggcatcgcggtgatgccgtcgctgccggcggcggtcgcgttggcgcatcagctgattacccccgtcttacccgcacctgaacgtgaacggccgaccttgctggacggcgtcgcggtgatcaacgccgggctgcgcagcttcgccgatgacctgcaaaccagcgacatcccggtggtgcattaccagtgggcgccggtggccggcggcgatcaacgattagccaacatcttgaaaaaattaaagtaaggaaccgctatgtacgcaacgattgagcaagcaaacgccgccgttatcgcccgtatccgcgaggcgcgcccgcactggcaggatgtggatctggcgcatcggttgatcccgcagctggctgaaggacgcaagctgctgcacgccgggccaccggtcacctggcaagagatgagcggtccggtgcgcggtgcctgcatcggcgcctgcctgttcgaaggctgggcgcaggatgaacagcaggcgctggcgctgctggagcaaggggaaatcgagttcatcccatgccacagcgtgagcgcggtggggccgatgggcggcatcacctcggcccacatgccgatggtggtggtcaggaacaccgtccacggcaactacgcctactgcaacatgaacgaaggcatcggtaaggtgatgcgcttcggcgcctatggcgaggatgtgcagcagcgtctgcgctggatgcgcgactctttggctccggtgctgaaagcggtgctggcgacgctggaggaggggatcgatctgaccgcgctgatggcgcaggcgatcagcatgggggacgaattccaccagcgcaatatcgcagcctcagcgctattgatgcgcagattggcgccggagattagcctgctgcctcgcgataaggcggagctggcgcaggtgatgcagttcctcagcatcaccgatcagttcttcctcaatctggcgatggcttactgcaaggcggcgatggatgcgggagcagaaattgagcagggcactatcgtcacggtaatgacccgcaacggcaagaactttggcatcaagatcagcggcatgggcgatcgttggttcaccgcgccggtcaatacgccggaagggctgttcttctccggcttcagccaggcggacgccaacccggacatcggcgacagcgcgatcaccgaaaccttcggcattggtggggcggcgatggtcgcggccccgggcgtgacgcgtttcgtcggggcttccggcggcatgagcgccgccaccgacatctccgaggaaatggcggagatctatcttgagcgcaacatgatgctgcagatcccgacctgggacttccagggcgcctgcctggggctggatgcccggcgggtggtggaaaccggcatcacgccgctgatcaacaccggcatcgcccaccgcgaagccggggtcgggcagatcggcgccggcacggtgcgcgcgccgctcggttgtttcgagaaggcgatcgaagcgctggccgataagctcggcatcacggcgtaagtgaacggaggggcgtatggacattgtcgcgctggccggcagccgccatgtgacgcaggactatggcgcgctgcgctgcgtcggcagcttcaacaacgcgatcaatttcctgacggaaaacgcgcggttgctgacgctacaccgcgccggcagcggcctgagtccgatgggatggcagctcggcgcgcgggatttcgaccgcgtgcgtcatgcgatgccgtccgtacggcactgcgctttctccaccactggcattttgctggatgcgcttcttgtccggcccgccgcgacggcgcgggatctggggctggcgcagcgggcggccattgccgatcggccgctggcggcggtattgcagcgctgcacggcgcagtgcgggttgcacggcgaaatcggtcggctggtgaagcggccgttaacgccggagccggccgggctggcgcgggatttctcccgttggttgcggggcggcgcggtcgactggcgccatacgctgggcaaagggccggggctgacgccgagcaacgacgacaccttgctcggtctgttgctgagcgcgcaccttgacagccgcatccaggtcgccgggctgacgccgtttttcgcccagacgccaccgctggaagcgttgaccacgctggtgagcgcgcactacctgcattacgccgagcggggcgtgttcgccacgccgctgcatatgctggcgcaggggctgcaggtacctaacggtgtatcggcggcggtggcggcggtgctgaacctggggcatttctcgggggcggacacgctgctgggcgtatggctgggggtgacgacgattaacgcactgtgcggcgcgcggtgtgaacatgagggccggatcgcggatccggccgggacggtatgatttcaactacgggtgcaaaccatgaaaaccttggtcattgcgttgggcggcaacgccttgttgcaacgcggagccgtgctctctgcggaaaatcagtataagagcatcgccctcatcgccgacgccatcggcaagctggcgcagaaataccgcatcgccatcgtgcacggcaacggcccgcaggtggggttgctggcgttgcaaaatctggcgtaccgcgatgtgccgccctatccgctggatattctggtggccgaaagccagggcatgatcggctatatgctggcgcagcagctgaatgccagccatccgcagcagccggtgtccacgctgctgacgcgggtgctggtggatgcgcaggatgcggattatcaggcgccgagcaagttcatcgggccggtgtatgcgccggaacagcggcaggcgctggaggccaagttcggctggacgctgaaggcggacggcaactatatccgccgggtggtgccttcgccggcgccgcaaaagatcctcgacatcgaggcgatcaccttgctgctgtcgcagcggcatatcgtgatctgcaacggcggcggcggcatcccgatgatcgccggcgagcatgggctgactggcagcgaagcggtgatcgacaaagatctggcggcggcgctgttggcggaacaggtgggggccgatcatctggtgatcctcaccgacgccgacgcggtgtaccaggagtggggcacgccgcgccagcgcgccattcgtcgcgccaccacgcaggagctggcgccgatggcggtggcggacggcgccatggggccgaagatcatggcggtcagccgcttcgtcgatcgcaccgggcggacggcgcatatcggtggcctgcaggatatcgacgcggtgctggcgggccaggccggcacctctattttaccttagctgccttcggtttatccgcgcccgcgttggcgcggataagtatgcctaaatggcatgatttcaataatttttattcatttcatgatgttgctcgccttggctagagtaaaaacacccccgtgtttaccgtcaaaaatttgtcatttttatttgcgactatgctttttgaaatgacatttcggccaaggattgttatggattcgctcagtgttgatgaactcgcccagaagaaagaccgctggtatcgcattgtagaggagatgctggccgaagccggcgtcgccatcaacggcccgcgcgcctgggatatccgggtgcataacccggcgctgttcaaacgcattttgcaggaaggctcgctcggcttcggcgagagctatatggacggctggtgggaatgcgaacggctggacatgctgtttacccgcattttgcaggccggcgtcgatgagcggttgccgaaaagcctgagcgacatcgcgcgcatcgcctatgcccgactgttcaaccgccaatcgcgcaagcgcgcctggcaggtgggcaaagagcattacgacatcggcaacgacctgttccgggcgatgctcgatccttacatgcaatactcctgcggctactggaaagaagcgcaaacgttggagcaagcgcagcaggccaagctcaggatgatctgcgaaaaactgcagctgaaaccgggcatgacgctgctggatatcggctgcggctggggcgggttggcgcagtttgcggcgcaaaactacggcgtctcggtgcacggcgtgaccatttcagccgagcagcagaagctggcgcaggcacgctgcgccgggctggacgtcgagatcttgctgcaggattaccgcgatctggatcgtcagttcgatcgcatcgtgtcggtcggcatgttcgagcacgtcgggccgaaaaactacgagacctatttcagcgtcgcggcgcgtaacctgaagcccgacggcctgtttttgctgcacaccatcggttccaatcaaaccgaccttaacgtcgacgcctggatagacaaatacatcttccccaacggctgcctgccttcggtgcggcatatcgccgaggccagcgaagggcgtttcgtgatggaggattggcacaacttcggcgccgattacgatcgcacgctgatggcctggctggagaatttcaaacgggcgtggccggaattggcgggcggttattccgagcgcttcgagcgcatgttcacttattacctgaacgcctgcgccggcgcgtttcgttcgcgcaacattcagctgtggcaggtgttgttcagcccggcgggcgtggagggcggggtgcgggtctatcgttgatatccctgcgtcttttccgccgcatcgttgttggctgcacgttcgatcccctggtcacttagttatctaagctcccagggcttctcacgtttgccgcctggatgcagcttcaggtatgacggatatcagtacagcagggagtacagctggcggcgatatttagcggccagcgcgtcgccggtgccgagtgcggccagaatgtccatcagggtcttgcgcgcgttgccgttggcggcggccagatctttcttcagatgccccatcagcagttccagcgcttcttcgttacgcccgacctgatgcagttgcagcgccagctgcaccgccagctcgacgttgtccggctcttgctgcacctgctgttgcagctgttggatttccggcgtgtccgccgcctgcttcaacagttcaatctgcgccaccaggccctgatagcgcgtatcgcgatcctgcagcgggatagtcgccagcaccgcttcagcgtcttcgctgcggctgagcgcgatctgcgtttcggccagcgtcaggccgatgtcgctgcgctgctggctgctctgccaggcgtctttcagcagcggcagcgcttcggcggcgttgccggcggccagcagttcctgcgcctgcgccagtttcagatcttcttccttcggcaggaaacgctgcagcaggtcacggatcgcttcttccggctgcgggccctggaagccgtcgaccggttggccgtctttaaacaggtagaccgtcggaatggaacgcagcccgaattgggaggcgatcatctgttcggcgtcgcagtccaccttggccagaatgaactgaccggcgtattccgccgccagcttgtccagcaccggcgtgagctgcaggcagtgttggctgcgctcggaccagaagtagaacagcaccggaatggacatcgactgttccagcgtctggtgcaggttagtttcgttaatatcaacaacagcttgagctagcatcttttttctctctgatcgtgcggagccatggggtgtaaatgggggcgcgccgccattcttcaaccccgtcgggcgaattaagcgttgctgcgcagcagccaatccagacagcggcccggcaaaatgcggcgcagcacgctcatcgcgtgcgccagcagggtgaccggatagcgcagtttggcgcgcgggctttccagcgcgtggcgcagtttgggtagaatggcctccggcggcagcgtcaggcgcttggcgatgccggggttgtgcaccggcttgtcgctctgcgcctggttgacgttctggctaaagtgggtggagatcggccccggttcgatcaggctgacctgaatgccgctgccgtgcagttccatgcgcagcgcgtccgaccaggcttccagcgcgaacttgctggcggcgtaggcgccgcgcccggcgctggagaccagacccatcaccgagctggtctgaataatacgcccttcgccgtgcggcaacatcgccggcaacagcagctgggttagctggtgggtgccgaacaggttggtggcgaactgccgctccagctggctgcgcgaaatgcggctgagcgggccgtaaacgccgaaccccccattattgaacaggccgtacaggcggccgtcggtcagcgcgatcacctcggcggcggcgcgctcgacgctggcgctgtcgtccagatccagctcgatgccttccagcccgagctggcgcatgttttccacgtcctgcggcttacggcaggcggccagcacccggtagccgcggttgcgcagatcctgcgccgcaatcaatccaatcccgctcgaacagccggttattaataccgctttttgcataactttacctagtgtacgaccctaatttagtgagactcatgctttactagcggttccaggcgctccgccatccaggtggcgataaacggctgagcgtccccattggggtgcaatccgtcatcctgcatccattccggcttcaccaccacctgttccatatagaacggcagcagcggaatgttgaactgtttggccaacgccggatagacggcgctgaacgcctcagtatagcggcggccgtagttcggcgggatgcggatctgcatcagcagcggctgtgcgccggcctgctgcacccgcgtgatgatttggccgagatcgcgctgtacgtcctgcgccgggaacccgcgcaggccgtcgttggcgcccagctcgatcagcacccagcgcggccgatgttgtttcagcagcgcgggcaggcgtgccagcccctgcgcggcggtgtcaccgctgatgctggcgttgaccagctgtggcgcgcccggctttttttgccactgttcggccaacagcgtcggccaggcccgctcgatcggcaggcggtagccggcgcttaaactgtcgcccaaaatcaacaaggtatcggcggcggcagcgcgtaaactgaataatcccaacagcaaaaggaagggaagatgccagcggaaaacgttcttgaagttcatcatcttagtaaacacgttggtcagggtgagcatcagctcaccatccttaccggagtcgagctgcttgtcaaacccgcgcagacgatcgccctgatcggggaatccggctcgggcaagtcgaccttactgggcatattggccgggctggatgacggcagcgaaggcgaagtgcgtttgctgggcgagtcgctgaccgcgctggacgaagaggggcgtgccgcgttgcgcgccagaaatgtcggcttcgtgtttcagtcgttcatgttggtgccgacgctgaacgcgctggagaacgtgcagctgccggcgttgctgcgcggcgagagcgacaggcagagccgcgagcaggcggtgcagctgctcgagcagttggggctgggcaagcggctcgatcacctgccggcgcagctgtccggtggcgagcagcagcgcgtggcgctggcgcgcgccttcagcggccggccgcgggtgctgttcgccgatgagccgaccggtaacctcgatcgtcaaaccggcgatcgcatcgccgatttgctgttctctctcaaccgcgatttcgacaccaccctgatcctggtgacccacgacgaaaccctggcggcgcgctgccagcggcggctgcggctgcgcgaaggcaagctgtgggaggaagcatgatctggcgctggttctggcgcgaatggcgctcgccgtcgctgctgatcgtttggctggcgttgacgctctccgtggcctgcgtgctggcgctgggcagcatcagcgatcgcatggacaaagggctcagccagcagagccgcgattttatcgccggcgatcgggtgctgcgcagcgcgcatccggtgccggaaggctggctattggacgcgcagcagcaggggctgaaggtgagccgtcagctgtcgttcaccaccatgacctatgccggcgatcggccgcagctggcggacgtgaaagccaccgatttggcctatccgctgtacggcaagctggaaacgcgcccggccaacatcaaacccgaaccgggcagcgtgctggtggcgccgcgtttgttggcgcagctgaacgtgaaagtgggggattcgctggaggtgggcgacaccacgctgcgcatcgccggcgaaatcattcaggagccggacgccggcttcaatccattccagaccgcgccgcgcatcatgatcaacctggcagacgtcgataagaccggcgcggtgcagccgggtagtcgcctgacctaccgttatatgttcgccggcgccgagccggatattcagcgttacgaggaacggctggcgccgcagttgacgccggatcagcgctggttcgggctgcaggaatccggcagcgcgctcggcaagtcgctgcagcgctcccaacagttcctgctgctgtcggcgctgctgacgctgctgttgtcgatcgccgccgtggcggtggcgatgagccactattgccgcagccgttacgatctgatcgcggtgctgaaaacccttggcgccgggcgtggcgcgctgcgtaaattgatcgtcggccagtggctggcggtgatggcgctggcggcggcgtgcggcggagcgatcgggctggcgtttgaagcgttgctgatccgcctgctgaagccggtattaccggctgcgttgcctgccgccggcgcctggccgtggctgtgggcgctcggcgcgctggtgctgatttcgctgctggtcgggctgcggccgtatcgccagctgctggctacccagccgctgcgggtgctgcgccgcgacgtgacggccaacgtctggccgctgcgctacttcttgccggtgacggcggcgatcgtggtggcgctgttggtggcgctgatgggggccagcacgctgctgtgggcgatcctggctggcatggcggtgctggcgctgctgctgggcggcatcggttggggcagcctgctgttgctgcgccgcatcacgctcaagagcctggcgctgcggctggcggtcaaccgcctgctgcaccagccgtgggtgaccatcagccagctggcggcgttctcgctgtcgttcatgctgttggcgctgttgctggtgctgcgcggcgatctgctcgaacgctggcaacaacagctgccgccggacagcccgaactatttcctgctcaatatgaccgaggcgcaggtgccgcaggtgaaaaccttcctgcagcagcaccagatcaagccggaaacctattacccgatcgtccgggtgcgcctgaccgagataaaccagcaggtggcgaccgagcgggtgcatgaagacgatccgggcggcgaggcggtgaaccgtgagctgaacctgacctggctggctgaactgccggatcacaatccgctggtggcgggcaattggccgccgaaaaccggtgaggtttcaatggatgaaggcatcgccgggcggctgaagatcaagctgggcgacacgctgaccttcagcggcgatacccaggcgttcagcgccaaagtcaccagcctgcgccaggtggattgggaaagcctgaagccgaacttttactttatcttcccgccgggcgcattggacggccagccgcagacctggctcaccagcttccgctacgacggcgacggccagatgctgacccagctcaaccgtcagttcccgacgctcagtctgctggacatcggcgcgatcctgaaacaggtgggcggcgtgctgcagcaggtcagccgcgcgctggaggtgatggtggtgctggtggtgctgtgtggcggcctattgctgctggcgcaggtgcaggtcggcatgcgtcagcgccgtcaggagctggtggtgtaccgtacgctgggggccggcaaacggctgctgcgccgcacgctgtggtgcgagttcgccctgctggggctggtggcgggcatcgcggctgcggtgggcgccgaggcggcgctgtggctactgcagagccgggtgtttgacttcccgtggacgccgacgccggtgctgtggtgggcgctgccgctggccagcgcgctgctgctgtcgctgtgcggcggctggctgggcgtgcgcctgctgcgcggcaaggcgctgttccgcagttatgaggggtgatgcggctatttataacgccggatgtgataagcacccggcttggcagaaaagagaggcgtcgtctttaaactgtattattttcgtgttttataatgtgtgatctgcgggttaccaccaggaacgaagggaatgaaaatctactggtcacttaaaagtatcccggaattaaaaaatttgcctttgcgcgaacgtctcggacgttggcagcgtggccttgcttcagcgggattctttaacggaacgggcatattgctggttgcattgttgccgtggttttcgattcttatcgctaacgatctgacccttaattaccctttcttgcgcaatcatatcgtcacagcgcttggatatggcatcagtggttttttgggtatgaatctgatgataagaagtatgctaaggaaaaataagaatattttttctgattaagcgcagcggtttaaaattgtcgtcataaaaaaggggttagccttgggctaaccccttttactttcggcggcgtgcgctttaggccagcttctgctgtgcccaggccagcccgctttggtattcgcccggcagcagcggtgccagcgtctgcagcgcctggcgcagatcggcggcgctcgggtcgttcagattgaggtggccgaccttgcggccagggcgcacctctttctcataccagtgcagatgcaccagcggcagcgacagccactgttcgttgacggcggtgccgatcaggttgaccatcaccgatggcgtgctcaccaccggctgcggcagcggcaggccgaggatggcgcgcaggtgcagctcgaactgactgatggacgcgccgttttgcgtccagtggccgctgttgtgcacgcgcggcgccagttcgttgatcagcagccgatcgccgacgataaagcactccatcgccatcacgccgacgtagttcagctcgttcaggatcgccgccagcatctgctcggcctgttgctgcagcgccgggttgggctgcggcagcgccacgctggtgcgcaggatgccgtcttcatgcaggttgtgggtcagcgggtagaataccgaacggccgtcgtggccgcgcgcgcccaccagcgacacttcgccggagaaattgatgccttgctcgacgatgcattcgccataggcgtcggccggcagttcggcttcctggcccggacgcaaacgccattggccacggccgtcataaccgccgacccggcgtttgacgatcgccagctcgcccagcgcagcgaatacctgcggccattcggcggcgctcgccagcagctgccacggcgcggtcgccaggccgagctggtcgagcagctgtttttgcgtcaggcgatcggccagacgcgggaagatgtcgcggttgacgaaggcgctatgggtcgccagctcgcgcgtcagcgcggtttccggccagcgttcgatctcggcggtaatgacgctgttctgatacggcaccgcctcgggttcggcatcgatgccgacagggtagacggcgatgcccagcggttcgccggcctggcgcagcatgcgccccagctgaccgttgcccagtacgcaaaccggcttcatgcgtcctcccgcggatcggggtggttcaaaacgtcttcagtctgcgcctgacgccagtccgccaaacgctgcgccagtgcggcgtcgtgcagcgccaggatctgcatcgccagcagcccggcgttggcggcgccggctttgccgatcgccagcgtccccactgggatgccgcgcggcatctgcacgatggagtagaggctgtctacgccgctcagcgcggcgctttgcaccggcacgcccagcaccggcaccagggttttcgccgccagcatgcccggcagatgcgccgcaccgccggcgccggcgatgatcacgtcaaagccgttggcggcagcctgctcggcgaagctgaacagcttgtccggcgtgcggtgagcggaaacgacttcgacatggaaggggacatcgagctgggtcaggacttcggcggcgaactgcatggtggcccagtcacttttcgatcccattacaattgcgattttagccccggcattggcggctgaagcggcgttggctcccatgggtgtaaggctcctgtgatttgtctggcgtcggctgagggccgaatgagggcgtagagcataccatgagcgcacggcgaggaaaacggttgcgtcgccggttttcaccggcgaaagcgcgaattttcactcgcgcgcctgcgcggaactcagaatgggaattggatcagctcgacagcgtcggcgctgactttgatcatcgatccttcgacgtgccaggcgcccagcaccgcgcgatgggcttcgccgttgctcagcgccagccggtgcaccgccgggcgatgggtatggccgtggatcatccagtgcacgtcgtggcgcagcatcgtttgctcgaccgcctgcgggttgacgtccatgatggcttccgacttgtactggttggattgctggctgcgagcgcgcatgttggcggcgatcttcagtcgccagcgcagcggcagcgcgaggaacaatttttgaatcagcgggttgtgcactttacggcggaattgctgataggcttgatcgtcggtgcacagggtgtcgccgtgcaggatcaggatcctgcggccgtacagttccagcactttttcttccggcagcagctgcatgccgctggcgcgggcgaagcgcttgccgagcagaaaatcgcggttgccgtggatgaaatagcagggcacgccggcctgttgcagcgctttgagcgccgcggcgatctccgcgtgcagcggctcgggatcgtcgtcgccgatccaggcttcaaacaggtcgccgaggatgtacagcgcgtcggcgtgcaccgcttcgcgccgtaaaaaacgcagaaaaccggcagtgattgccggttcctgtgcgcacaagtgcagatctgcgatgaacagcgtactcatgcagccgcgattactcgctgacggtcacgctgttgatgacgacgtcttctaccggtacgtcctggtgcatgccgctgcggccggttttcacgcctttgatcttgttgaccacgtccatgccttcaaccacttcagcgaacacgcagtagccccagccctgcacgttttcgccgcggaagttcaggaagtcgttgtcagccacgttgatgaagaactgtgcggtggcggagtgcggatcgttggtgcgcgccattgccagggtaccgatggtgtttttcagaccgttgttggcttcgttcttgatggtcgcgttagtcgctttctggttcatgcccggttcgaaaccgccgccctggatcatgaagccgttgatcacacggtggaagatggtgttgtcgtagaaaccggcgcggcagtagttcaggaagttttcaacggtaaccggcgctttgtcagcaaaggtcttgataacgatatcgccgtgattggtgtggaaagtaaccatagttttaatcctaacaaggtgaagtgagacgtcacgtaaagcgagtgaacattcagaccgcccttataacatatccgccccagcgagtcagcagcggctcaaccgcgcactgtctgtggtaattgcatttgtgttatattataacaattgtgccggccagcgaatttcgcgcattttattcgcgtgaagtcagcaaagcttggccttaaccttgcaatagatcaggcttcaggtttcaatacgctaccgggcgtaaaacctgaagcccggttatcttttttgttatcacgcacaccacggaatctcccgatgctaaagatttttaataccctgagtcgtcaaaaagaggaattcaaacccattcatgccgggaaagtgggcatgtacgtgtgcggggtaaccatctatgacctgtgtcacatcggccacggtcgtacctttgtcgctttcgacgtggtggcgcgttatctgcgctatctcggctattcgctgaactacgtgcgcaacgtcaccgacgtagacgacaaaatcattcgccgcgcggcggaaaatcatgagacctgcgaccagctgaccgaacgcatgctggcggaaatgcatgccgacttcgacgcgctgctgatcgatcgcccggatcaagagccgcgcgcaacccagcacatcgccgagatcatcgagatcacgcagcgccttatcgatcgcgatcacgcttacgtggccagcaacggcgacgtgatgttctccatcgacagcgatccgcaatacggcctgctgtcgcgtcaggatctggatcagctgcaggccggcgcgcgcgtggagatcgacgacgtgaagcgtaacccgatggacttcgtgctgtggaaaatgtccaagccgggcgagccgagctggcagtcgccgtgggggccgggtcgtccgggctggcatatcgaatgctccgccatgaactgcaaacagctgggcacccacttcgacatccacggcggcggttccgatctgatgttcccgcaccacgagaacgagatcgcgcagtcgagctgcgcccacgacggcccgtacgtcaattactggatgcactccggcatggtgatgatcgacaaagagaagatgtccaaatcgctggataacttcttcaccatccgcgacgtgctcggccattacgatgcggagacggtgcgttacttcctgatgtccgggcactatcgcagccagctgaactacagcgaagagaaccttaagcaggcgcgcaccgcgctggagcgcctctataccgcgctgcgcggcaccgacgccgatgccgcgccggccggcggtgaagcgttcgaagcccgcttccgcgaagcgatggacgacgacttcaacactccggaagcctactcggcgctgttcgatctggcgcgcgaagttaaccgcctgaagagcgaagacatggcggcggccaacggcatggcggcggagctgcgcaagctggcgaaagtgctcggcctgctgcagcaagagccggagcagttcctgcaagggggcgcacaggttgacgacggcgaagtggcggagatcgaagcgctgatcaaacagcgtaacgaagcgcgtgccgccaaggactgggcgctggcggacgccgctcgcgatcgcttgaacgagatgaacatcgtgctggaagacgggccgcagggcaccacctggcgccgtaagtaagccggccgaagtgaaaacaaaaaaggcgctgaattcagcgcctttttctatggctgcaggttagggtttaaccatgaccttgccgccgttgaactccaccacctgatcggcgacgatcttgcagcgcttgcgggtttcgaccttgccgtcgactttcaccagcccttcggcgatgacttctttggcggcgccgccgctttcacaccagccctggaacttcagcagatcgcacagttcgacgtggggatgattgtccagattgaaaatttccatactgccttacttatttaggttgaacgtcgtgatattcctcgcaggcctgcaaggtattttggatcagtgtagccacggtcatcgggccaacgccacccggcaccggggtgatgtaggcggcgcgctcgctggcggcgtcaaaatcgacatcgcccaccactttaccgctttccagacggttgatgccgacgtccaccacgatggcgcccggtttgatccagtcgcccgggatgaagcccggtttgccgaccgccaccaccagcagatcggcgttctcgacgtgatgacgcagatttttggtgaagcggtgggtgaccgtggtggtgcagccggccagcagcagctccatgctcatcgggcggccgacgatgttggaggcgccgaccaccacggcgttcaggccgtaggtatcgatgttataacgctccagcagggtgacgatgccgcgcggcgtgcacgggcgcagcttgggcgcgcgctggcacaggcggccgacgttgtaggggtggaagccgtcgacgtctttatccggatggatgcgctccagcaccttgacgttatcgatgccggccggcaacggcagctgcaccagaatgccgtcgatttcctcatcggcgttcaactggtcgatcaacgccagcagctcggcttcactggtggcagcgggcaggtcgtaggagcgggagaggaagccgacttcatcgcaggcgcggcgcttgctggcgacgtaaatttgcgaggccgggttctcgccgaccagcacaaccgccaggcctggggcgcgtttgccggccgccagacgttgtttcacttgctcagccacttcgtttctaacctgctgcgcaatcgttttaccatcaataatctttgctgacatcagtgtggaaatccatcaattaagaaaagcggggatgccgctattctgtcagaagctgagcgcgctgtcaggcgcagaatcaccctcgccgccgttgccgaggccgatttacgctttttttatgccggcttcaggaacctctacgccatttttaccggcatttgcatacgctggggccatacacagggcgaaagagggcaggatcatgagagcgataactcggctttatccgttgcatcaccagcctggcgagcaaccggcgcagcctaaacatgtgggggagacggtgttcgattcttcgctgcatccggcggacagtgagcaactcaccgcgctgcatcagctcggcaagcatgaggcggcgccgttgtggcgggcacgcctgaatgcgctgtggcggaagttatgcgtatgaagggctgcgcctgggcaggctgcacgctgttgctggtttgggcatcggggagccaggcttctttaaacagcgcacgcgctgacgccgcatgggttgaaaacgtggcggcgacttgcaacacacgggtgattgagcatgccgattggggggacattgccgcagtggttatgtctgctcgcctctgccagcggcgggacaacgggcggcaagggcgtgagcacgcgccgatttacgtaggcgccgggctggctcagcgtaacggcgcccgttgacgagaaccctcgccgcgcgggcgctggtggaaaaaacgccataaagcacggccgccgtcgtaacgtcatgaaaaggcattgactcgctaacctctgaccgtataatcgcaacccgcagccgcaggttgccgcatctcaatgcgcccttagctcagttggatagagcaacggccttctaagccgtaggtcataggttcgaatcctatagggcgtgccattaagtatcaattagttatgctcattcccccactgcaagattttccaaaagtgccaggttagtgacattgcccgccaagacttcgtcaatttttctcgcatgttcggttagatgagttggggataggtgagcatatctctgtaccatctcgatgctctcccatcctcccatttcttgcagtgccgaaagtggcacgcctgcctgaaccaaccagctcgcccacgtatgccgccgtttttgcttcatgtgagcgcgatatgagaaaggcataaaaatggccacgccaaaggataggctatttgatagaacggcaattaatacgcgaaaaggattaaaggcgctgaagtgaattaaagaattttcccttccatcacgtaaaaatctccattcatcgttgtgtagtaagcataagaaatgtgtttttcgaagttatcgcagtgaacaacggtatttttatcggattcttgccaggaaatcatgaaatagccgtcagccaatgaacgccactggaaaggcacattcataatggttccgcgaagttctccgtttagaaactcaacggtaatggtgttttcactggcatggtaggcgtttttaacttcgagaccattgtccatcttgatggtaaaagattggcctgcataaggaaattttacagccattgtcgcaactcctttaatgtgtcgtagctgaaaagcggcggtgaagcacgctgctatcccgaatcactcatgcctaaggcggtagtgaggtcagccagctgagcgttaagcggctggataggtccaatagtagagagggcgcatcggtggaaaaagggagcggcgggcaattcacttttctctttttgttcataaaggggatgggcggcaggttactgttcattgcgggggggattaagtgacgggactttgtctgacaccgagcgcggtcacaggaaacggcaagcggcattgaaccttcgtttattttgccgcgttacaataggtgaaaatttacccatggagcctatcgtgcgcaaatccagattctttctcgtgaccttgctgtgtctgtgcgccgccgccgtgctgtacgtcatggcataccgggcgctggggcattacctcagcgacggcgagaaggcctacccggatatcagcgttgaaattcgctgagggccggtcggcgcggtggtgatcgcgccgacttttttgcactgatttacccgccatttacccgccgtcggcaatgatgacgcagcgtctccacattgtgtggttctcttgggcggaatgcggttatgtcactgcaacaggtttcgaatgtctcgttgagcaacaacggcttaaagggcatcggttacaaacattatgcgttggcgatcgtggcgttttcggcgctcgtacggtctatatccttaaccgacaggtatttttggtgcgatgaggcctccagcgtgctgaccagccgctatgacgtaggcgctttgctgtaccacgcttccttcgatgttcacccgccgctgtattacctgttgctgcatggctggatggtgctgtttggcgacagcatcatggccgcccgttcgctgagcctggtgctcggcgtggcgacagtggcgctggcgatgcgctttacccgttggctggccaacgagcgggcggcgctgatagcgggctggctgatggcgatcatgccgatggcggtgcgttacagccaggaggcgcgcatgtatgcgctgatggggctgctggcgatcgccgccgccatggcgttggcgaagtggctgaaaacgccggataaccgccgttatctggcgctgtatgcgctgttgatgacgctgagcttttatacccattacttcacgatttttaccctgatcgcgcattggctggtggtgttggcgctgtcgtgccgccgcgaaggcgagtgttatatcaagcaaccggcgtggtggctggccaatgcggcgatcggggtggcctacattccctggctgctggtgttgttcaatctgctcgcgcatatcgccgagctgcgggtcggcggcgacgtcggttggatccctcaggtttcctggagcgatctgccggcgatgttctggcgttttctcaccggccatgatggcagcaactatcccacgatcattctctggctgttgccggcgatgtttgtcgctttatgttcactgctgctgtggcggcgccagatgcagagaaaatacgctctgctgctgctcggcggcattctgatcccggtaatgttggtattcgccatttcctggcgctcgccgctgtttgtcgatcgctatctctattccgccgcgctcggcattccgctggtgttgggcgtgctgatcgccggaacgaaaaaccgagtgcgcgggatctctttgctgctgttcttcagtttgttgttcggctgcggcgtgcgtaacgattacccggccgagaaagatgagttcaaggtgatggtgcactatatcaacagccactatcagcctaacgatgcggtagtggtcagcaacatgttcaactacctgagctatgtgtattacaacaaacagggctaccgcgccttgctgtataccccggccaggcccaacggcatctcgggtaagcccaatgcctatggtttcggcacctttttccacgatcgggcggcgcagacctacgtcgataagctcagcgccttatcgaagggccatcgccggatttggctggtcagcggcggcgatttcaaccaggacttcggccgttcgccgccggggtgggtcaacaccgttaccttcaagagcggcgggttcgagtcgcgcctgttcgcggtgcgttgagcaaaatgtcatatttcccattcggcgttacatctggccgagcaaacttacgcggggatgacagttctatacattgagattgatactgtagctctacccgatgatgttgtgtgttatccattccctgtagtgtattaccccatccctgttaagtttatcccgccttgtgcgggattttttttatctgcgcggggcgagatgcaggccgccggtcatgatgttgcgggtggccggcagggcgagaaaatcgtgtgggaatcccagctcgatggcactgagatcgtccaatcgccgccaatgatcttccgtcagcgccaccttcaatgcaccgaggttatcttccaattgcgccagagttcgggcgccgacgatcggcgcggtgaccgtcggctggcgcaacgtccaggccagcgcgatttgtgatggggcatacccggtctcgtgagcgatcaggttgacggcatcggcgataccgagattgcgtgcgttcaatgtccccttggcgcgtacggcttcgcgccgagtgcccgcttcatctggcgatggctgcagatcctgtcgccggtatttgccgctcagcacgccgccggccagcggcgaccaagggataacgcccatccccaattcttgcgccatcggcagcagttcgcgctcgacggtgcgttccagcaggctgtactcgatttgcaaggcgataagcggcgaccagccgcgcaggtccgccagcgtttgcatcctggacgcctgccaggcagggagatcagacaccgccacatacagcacttttccggcgcgcaccaggtcgtccagggcgcgcatgatctcttccaccgacgtggtgaaatcccaggcgtgcagatagagcagatcgatgtaatcggtattgagccgttgcaggcttgcttcaaccgatcgcagcatgcttttgcgatggttgccgccggaattgggatcgtctggctgcatcggcagggtgtatttggtggcgatcaccaaccgatcgcggcgcccggcggcgaactcacccacgaaaagttcggcgctgccctcggtatagcggttggcggtatcgataaagttgccgccgcgttcgacataaacgtcaaacagacgtcgagcctcggccagttcggcgccccagccccagtcggtgccgaaggtcatggtgccgagcgccaacggtgaaacgcgcagaccggaacggcccagcaggcgatagtgatccagtgaaagtgtggtgttcataggcattctcccgtgtagatgccgtccacgatagcgcccgtaggttgtttaaggaatgggctataatcttcatgaattattaagtagggagagcataatgaggggcagtgatttcgccgaattgcgcgcctttgccgctattgtcgagcacggcggcttcgcccgcgcagccgcacatttgggtatatccgcttcggcgctcagtcaaacgctgcgcaacctggaggcgcgtctgggtgtgcgtttactgaatcgcaccactcgcagcgtggcgccgactgaagccggaagactgatgttggcgcgcctgacgcccgcgatggccgagatcgacgcggcggtggcgcaggcggtagagcaacgccagaacccctcgggtcttttgcggcttaacgtaacccgcgtggcggcgttgcattttctggcacccttgatcgcgccgtttcatcatcaataccccgatattacgctcgatctcaatgttgaggagcggctggtggatatcgttgccggcggttttgatgccggcgtgcggctgcacgagaaactggcgaaagatatggtggcggtcaagctgggcggggaggtgcggatgcgtgtcgttgcttcgccggcgtatttggcgcgtcacggccggccgttaacaccgggcgatctgcatcggcatcggtgtttgaattaccgctggccgaccaacggcaatgtgtatcgctgggagtttgagtgtgacggtgaaaagcaggagatcgccgtgaaagggccggtgacagtcgatgagccggaaatattggtgagggctgcgatggatggggtaggcattgcctacctgtttgagcaacaggttgccaccggcctggccgaggggaggctgttaccgctgctcgatgcctggacccctccgttccccggtttctatctgtactatccggcaaaccgccaaacgccgcgcccgctacgcgcttttatcgacttcgcccgtcaacaggcagaacagggcgcgtaacgcgatttttttgaataacaccgtcagttttattcggtattcagtcgctgtgcgcttgattagattgaacgcgagaggggcgccgtcggcgcctttgtgcaatgagtggagaatttctatggcgaagacagtagtggtgtttcattccggctacggccataccgagcgtttggcgaaagtggtggcggaaggcgccggggcggaactgatcgccatcgatcagaacggcgatatcagcgacgaagcctggcagacgctggatgaggcggatgccatcatctttggttcgccgacctatatgggcggcccatcctggcagttcaagaaattcgccgacgccagctccaaagcctggttcggccgcaagtggcaggataaagtgttcggcggttttaccaacagcgccagcctgaacggcgacaagcaggtgacgctgatcgcgctgcagacgctggcttcgcaacatggcggcctgtgggtcagcctggggctgctgccggccaacaccaaatcggcgcagcgcaccgacgtcaataacctgggcggttcggtgggtctgctggtgcagaccccggcggatgccggcgtggatgagatgttgtcgggcgatctggcgaccgccaagctctatggtcagcgcgtagcgggctttgccgccaaactggcgtaagacctatcgtgtagatgggacggcggtgcggttgaacggatgccgcgttcattttctctgcacaattggcgtgtaatctgcgaaatgttattagcctgcttgggctaacactgcatttcgtacaaatattcccggttcctaggccgggttttttgttgctaaggtctgcttaagctttcaccgctatactgcgcgtcagcacggtcatgcaatgcatggccgtgtcgtaactgtcgatttgctgttgttcaagcaagcccgcttcatgcgggctttttttgggttgttattgcacaggcggcccagttgcaggaaaataatcgcacagtgattcaaacatcatttaatgaccaataaccacaagtttattaatgtaattaacgctctcggcggcctattacgctatgcgctatgctgacagcagagcgggcattatttgctgacgctatgcggggagttacggcgcggccgcatcaggctaagaaaattctgttaattaaatgttaatgttttttattattgatttgtctggcttttttggttgaaattcggattgactatccctcactggccgggcgagagagtatgcatattattattctggttattagcaaaatatgggcgaggcgatgagcgccagaataaacgccaggcatggcctgccgctaacggtgcagctgatcaatcttttcatgctggcctttttactctccctggtgggtattcttagccggccgataggttcactttctttattttggccggtcaacgcgattctgctcgggctgctgctgcgtaaacccgtttacgctacgccgctcggctggctcaccacttatctgggcatggtcgccgccgatctcagtaccggcgagggctggtccctggcgctgtggctgaacgcctgcaacatgtcgctgatcgccgtcggttacggcatcatgctgatgctgccgcaatctcaacggcgcatgggcaaaccccaggcgatactctatatgttcagcgccagtctggccggatcggcggtggcgtcgacgctgtcggtgctgcgtaacgacagcctgtacaacaatacggtggtggtcgcctggttggcctggttcagtgagcagttctcgacgaccttgttgttgttgccggtgctgatggcggcgccgcggttgaaacagctgtttcgcatgcaggtgcgttggcgcctgaaaggctgcctgccgctattggcgctactgctgtcgctggcgttcagcgtctatatcggcgggccgggcgccatcgccttcccgatcccggcgctgctgtggtgcgcggtgcgctaccagttgttccccgtgacgctgttgacgttgttgaccggcatgaccgagatcagcaacatttcagccaacctggtgctgtatgaaacgccgaacaatcacaacgccttcctcgacaccctgatgtctgcccgcttgggcatcgccatgctggtgatggggccgctgatcctcgccagctctatcgccgccaatcgcaagctgatgcggcgtctggagcacagcgccaaccacgatttcctgaccggggtgctggcgcgcagcgcgatgacgcgcaaagcgggcgagctgctggagcacaagcaccgctcgaaagaggcggtgtcgctactgcttatcgacatcgatcatttcaagcagatcaacgatacgcacggccacagcgccggcgatcaggtgttggcgtcgttcgcgcacatcgtgcggcgcgagctgcggcacgatcagctgttcggccgcctgggcggggaagagttcgccatcatgctgccgcgcgcgctggcggcgcagggcgtggcactgggggagcatctgcgccggttggtggagcaggcggaactgcaggcggaaggcaaacagacgctgaaaatcaccatcagcgtcggcgtcgccagcctggcgatgaacgaagtgaaatcgctggagcaactgatgaatatggcggatatcgcgctgtatcgcgccaaatcgcaggggcgtaatcgggtggagtcgttcaacgtggtgaacggcaacagcgtcgagcatattctgtttcgctaaccgctttcagccttgcctgggctcgaagcgggtctcgcaattagggcaaatcagtatcacgtcttgcagcattgccgcgcatttttgccgggtaacatagccgcatttagggcagacgatttgggtggagcggttgataaaacctttgacgctgctggaatcggacatatcaatagcctgtgtcaggtgaaaactcacgctaacacaggcgacgacaaattccgttggttattttctgtacgcagaggctacaagcttttcagcgccttgatggtctcatccatgtcgatctcgtgctcggagaaggtatgggtggtgttctggaaggtggtgatggtcagcatgcgcagcgtttgcatggcctgcgcctggtcttcggactgcgggcgaatgcggttcatcagcaggccgaccgacagcacggtgttctctttatccacatcggctttgaccggcacttccttggtgaaggtattgaaagacttgatgctggcgatcttgattctttcattggcgatgatgatgtatttgctgggcgccaacactttgaccgcataagccgacgggcctttggtgttgttggtcggttcgaaggtcaccgccgcgtttttcttaatcagctccggattttgcactttaatcacgtgaaaataacgattttctccgttctcgtcggtaataaagccgaagcctttgtcttcaaaaaaagtcgttatcttgccgttcatcgttattctcacaaaagggatcaatacagcgcttatgatagcgcggaatgccttgcagcgacagattgcgcgggcggcatttagtcatgcgataacggcatttagcggcttttcctccacatgctatgttcatgctgacttcattcaatgcgaaaaaggaatatcgatgggtatcaaacgtctcaatcacgccgtgctgtatgtcagcgacgtgcggcagagcgccgacttttatcatcaggtattgggcttcaagctgaagccgtccgacagccccgaccgggcggtatttacccaggccgccgattcggacaacgatcacgatttggcgttgttcagcaagaacctgggccagcagcgcgccggggtgtttcgcgccaacggcgagccgccggcggagcatgagccgccggccgggctgtaccatctggcctgggaagtggacagcctggaagagctggagcgcattcgccaccagctggccgaacgcggcattctcgggttggaagaggatcacggcgtgcacaaaagcatttatggccacgatccggacgggctgctgtttgaggtgacctggtttattcccccggcgttgctgaccgaagaggacaaaaaccagcaggggatccgcccgctggatttcgccgccgagaagcggcgtttcgccggcctctaacctgctgctgcccggggcgcatcggcgccccgacgctcacagcactttgttgagaaagttaacggtgcgggggtgctgcggctgagccagcacctgcctggcgtcgccctgttcgacgatctgcccgtcgaccataaacaccacccgatccgccgcttcgcgcgcaaagccgatttcatgcgtcaccaccaccagcgtgacgcccagatccgccaaccctttaatcacgtccagcacttcgccgaccagctcgggatcgagcgcggaggtcggctcatcgaacaggatcaccttcgggttcagcgccagcgcgcgcgcgatggcgatgcgctgctgttggccgccggagaggtggcgcggataggcatccgccttgtggcgcagcccgacggtatccagcagctcataggccaccgctttcgcccgttcgcgggagtgaattttgtgcaccaccggcgcttcgatgatgttttccagcaccgtcaggtgcgggaacaggttgaagttttggaacacgtagccgacgttgatgcgctgccggagaatggccttttccttcagctcgtacagccggttgcccttgcggcggtaaccgacgtagtcgccgtcgatgcggataaagccttcgtccacgcgctccaggtggttgatcgcccgcagcagcgtcgatttgccggagccggaaggcccgaggatcacggtcacggtgcccggctgcagcgtcaggctgacgtcgtccagcgccttgtgtttgccgaagaacttgctgacgttgctgatttcgatcaggccgcgcgccggcaccggggtgaggttgcgtgccggctgttcgggcaaggcgtaataatcaatggcttcagacatgcgggtctcctaacgttttagccagccggccagtttctgccagggcgtcggcggcagttcgcgcaccgcgccccgggcgaaatagcgttcgatgtagtattggatcaccgacagggcggtggtgatgaacagataccagacggtggccaccatcagcagcggtatcacctgctgggtgcggttatagatcacctggatggtgtaaaacagctccggcagcgccagcacatacacgatcgaggtgcctttcgccaggctgatgatctcgttgaaaccggtcggaataatggatcgcagcgcctgcggcagaatgatgcggaaggtgcggcgatagcccggcaggcccagcgccgccgccgcctcgtgctggccgtaatccacgcccagaatgccgccgcggatgatctcggcggtataggcggactgcaccagcgtcaggcccagcaccgccacggcgaactggccgaggatatcgatggtcgggtagctggcgaacaccaccgaggtaaagggaatgcccagcgagatggcgtcgtacagataggaaaagttatacaggatgatcagcaccaggatcagcggcagcgagcgaaacagccagatatacccccaggccagcgacgccagcaggtaagagcgcgacagccgcgccagcgccagcagggtgccgaacaggatgctgaacaacgtgccgagcagcgtcagcagcagggtctgccccagccccgccagcaccgccggggcgaagaaccattcggcgaacacgccccattcccagcgcgcgttgcccgccaccgattgcacgatggcggccagaataaacagcgagaacagggcgccgatcagccgcagcggatagcgggcgggcaccactttcaagacttcttgtttggacatgtcatgtctcctgactacagataaaggggggttaggcgattttcctttccgacgcgcaacaacacgcgtcctctgcaatcaggcttttgcggaacggcaggcggccatcgtagggcgggcggctgtaaacctcgctgtcaacggtgggatcgaactgcggctgataaccgttgctcaggtacaggcccaccgcttcgggctggcgaaagccggtggtcaggtagagccggcgatacccctgcgccagcgccagcgtttccaactgctgcaacacccgctgcgccaggccctggcggcgcagatcgccccgggtccagatgcgcttcagctcggcggtttgcgcgtcatagcgtttgaaggcgcccatggcgatcggcgcaccggcgcgcagcagtacgatgaaggccccttgcggcggtgcatacaggtccagcggttccggttcctggtcaccaaaatagtcgccgtaacgctggcgatattcaccgaacagcccctcgatcaccggggcgatcagcgggtcggtcggcaacgtctgaatgaaggtgtcttgcgtcattgcgcgctcctaatcgcccaggccgggcgggttgatttccgactgcgcaaggcgttcgacgctctcgccccagcgattgagcacctgatcgtactgtccgccgcggatcgcgccgttcagcgcttcattcaccgcctgcaccagcccgttgcctttacgggtggtgacggcgatgtgtgccgccttgggccaaccgccttccaccgtgcccgccagccgggtgcggccgttcagcgccgctttataggcgcccagcacgttcggcccgaaataggcgtcggcccggccggactggatcgccagcgtggcggccgcatcgtcggtcacgtagatcggctggaagggtttgagcccctgctgccggttctgtttgtcccacgccagcaagatggcttcctgattggtgccggagccgacgatgatctttaatccggcgatatcggcaggctgtttgatcgttgcgatcttgccgccggttttgacgtaaaagccgagcgagtcgatgcggtaggtggcgaagtcgaagcgggttttgcgctctttggtcacggtgacgttggtgatggccgcgtcatacttgccggaaaccacccccagcggccagtcttcccacgacgtttgcactacgttcagctccaggcccaggctgtcggccaccagctgcgcgatatccacttcgctgccgataagccgccggttgtcggcagcgaacagcgccagcggcggcgtgttgagcgcggcgattgcaacggtgaattggcccggcttcacgaagtggaaatcggccggcagtttggcgatcgcctgcgggtttttcggcgcgtggatcggggtttcattggcctgtaaatcgatgccggtgcccgcctgcgcggcgccggtcaggctcagcaaggccgccacgagagcggcggtaacggttttctgcatagcgggtatccctgaaaacgatcttattattgggtgaatctgttcaacgggtgcttcaggcccaggtgttcgcgcagcgtatcgccgtggtacgcccggcggaacaggccacgttgttgcaggatgggcaccacccgatcgacgaagtgcccgaaggcgttgggcgtaccgccgctgatgatgaagccgtcggcggcttcgccgtcgaaccagcgttgcaggccgtccgccaccgcttccggcgtgccgctgaacaccgggcgcggcgaggcggcttccagcgccacctggcgcagcgtgaggttccgctcgcgggcgttgcgcttgatggcgtcggtggtgctgcggaagctgttttgccccagatcgccgatgtccgggaagggggcgtccaacggatggcgggaaaagtcgtaatgttcgaagtagcggccaaggtagttgagggcgttctcgatgctgaccagacgggcggtctcctggtactgacgctcgacgtccgcatcgtcgtcgccgacgatcacgctgacgccctggaagatgcgcaggtcgtccggttcgcgcccctgttccaccaactgccgcttcacgtcctggtagaaatcctgcgcctgctccagcgtgtcgtgatgggtgaagatcgcatcggcgtgtttggccgccagccgtttgccgtcttcagaggcgccggcctggaacaggatcgggcggccctgcggcgtgcggccgatgttcaacggcccctgcaccgagaagaactccccctggtgattgagggtgtgcagtttcccggcgcggaaaaattcgccgctggccttattgcgcacgaaggcatcgtcttcccaggagtcccacagtcctttggcgacgtcgagaaactcgccggcaatgcggtaacgcaggctgtgctccgggtgttctttgcgcgagaagtttttggccgacccctccagcggcgatgtcaccacgttccagcccgcgcgcccgccgctcaggtgatcgaggctggcgaactggcgggcgacggtgaacggatcgctgtaggaggtggagagcgtgcccaccaggccaattttgtcggtggcggcggacagtgcggccaataaagtcaacggctcgaaacggttaagaaaatgcggaatggacttttcgttgatatataagccatcggcgacgaagacgaaatcgaatttcccttgttcggcttttttcgccgaggcgatattaaattcgaggttaatgctggcgtcggcggtggcatccgggtggcgccaggcggacatatttcccgatgcgccatgcagaatggcgcccagccgtaattgccgttgattattcgcgttgtcgctcatcgtgattatcctgtcatgcgccgcaaaggcgcgcggtgtctgatgcgtccactattgatgagcggcaacgggatgtaaaacaacaaaacagcatattcaaatgttgaaaactgcaaatatcacggcgagcgaaaataataatccccgacgcggcatcagcggcgtcggggaaatactacttcacgttattcaggcgttgctgagggcttttttcgctgcggtggttaattgttgcagcgtgcgctccgccagcagcgaaaaatagtgggcggcagggaagagggcgcgctcatcgggattgaaacgcggatggtgcaggccgaattcgctggcggagccgatgctgacgaacgcgcccggcacgtgatgcagatacagcgcgaaatcttcgccgcccatctgcagctccgcctcttcgacccggtagccggcctcggcggcgacggttttgctgaatgccgcccaatgggcgtcgttgatcaccgccggcggccccggctgccagtggagttcggcctgcgcgccgagcgcggcggcgacgccgtcgatcacctggcgaattttatccggcacctggcggcgcaccgcgtcgctgtgggtgcgcaccgtgccttccagctccacggtttgcggcagcacgttccaggtattgccgccttcgatgcgcgtcacgctcaccaccagcgattccagcgagctgaagctgcggctgggcagtgtctgcagcgcgccgacgatctggctggcggtgacgatggtatcgacgccctgttccggtttggcggcgtgggcgcctttgccggtgatgcggatctggaagcgatcgacgttggcgtaaaacggcccggcgcgggtggcgaaggtgccggtgggcagctccggcgcgttatgcagaccaaataccgccgcgacgttatccagcgcgccggcgtcgatcaggtgccgggcgccgttgaaggtctcttccgccggctggaagaagatgcgcaccgtgccgggcagctcggcctcacgcgctttgagcaggtgcgcggcgccgagcatcaccgaggtgtggaagtcgtggccgcaggcgtgcatcacgccgctgttttgcgagctgaaaggcacgtcggcgatttcgtcgattggcagggcgtcgatgtcgccgcgcagggcgatgatcggccccttgccgctgccgatctccgccacgacgccggttttcagcgccaacggcagaatacgaatgcccgcctcttgcagccagcgggtcaggcgggcggtggtggcgaattcgtgattggaaagctccgggttttggtgcagttcacgccgataggcgatgatcttgtctgccaactggctggtcataggcttggctcacagtgggaaataaaccctaaccctagtgcaggggccgccgaagcaaaaagaccatctggttatatttcatagcgattgtgtctgctcgacgcgtcaacgatgggggaaagggcaggtttaggcgttcacgcgttgttcgccggcgcagggagaggattggcctggaacggtaacgtatcgcaaccggtgcaatgcatttacaccgggcaacacggattttttcactctttatcggatttctgtgatcgcggtggtggacaaaatcctgcctgcttgctgtactgtaatcgacacaggttttgtgtctttcattcacgttaaaggtaagtttgatgtctaagattaaaggtagcgttaagtggtttaatgaatccaagggcttcggtttcattactccggaagatggtagcaaggacgttttcgttcacttctctgccatcgttagcaacggtttcaaaacgcttgctgaaggccagcgtgtagaatttgaaatcacgaacggtgccaaaggcccatctgccgctaacgttactgctatctaagctgcgtagctgaatttcttaaaacccgctcattgagcgggttttttattgggcgcattatgcgtcgctgcggcgggccaacaggctgaacagcaggatggcgacggcgtaacagccgacgatggtcagcgccatcgacaggcctgaggtgccgcccagcccggtgagcggcacggcgcaggcgccgagcgcgaacatgcacacgccgatcaaggccgacgcgctgccggctttgtccccctggctttgcatcgccagcgacgaggcggtcgggccgacgatgccgatcaccgccaccgagaagaacagcggcaccagcaacacgaccagcggcgcatgcagcgcggcggccaacagcagcaacagcgacgcgacggccgccagcgttaacccgcccctcaacacccggcgttccccccaacgtgaactgagacggctggccagctgcgccgcaatgatcagcccgacgccgttaatggcgaagcacaggctgaacatctgcgggctgaggccgtagatctgctgcaagacgaaaggcgaagcgccgatataggcgaacatgccggccattacgaagccctgcgtcaggcacaggcccatgaaatagcgctgggtcagcaacccgccgagcgacatcagcatcgccagaatgccgccctggctgcggcgctcgaccggcaaggattcgcgcagcttcagcgccgacaggctgaacagcagcacggcgatggccgccagcacgccgaagatgccgcgccagttcatcacctgcagcatcacgccgcccagcaccggcgcgacgatcggcgccaggccgttaaccagcatcagcaaggcgaagaaacgggtcagctcatggccggcgtacagatcgcgagcaatggcgcgagaaatcaccgcgccgccggcgccggcgatgccctggagcaggcgggcgatcagcagttggtcaatggtgggcgccagtgcgcaccacagcgaagcgcccagcagcaggatcagcgacagcagcagtgggcgcatacggcccagtttgtcgctgtaagggccgaaaatcagctggccgacgcccaggccgagcagcccggcggtcaggctgagctgagcggcggcggtggaggtattcagctcgcccgccatttccggcagggcgggcagatagagatcggtgcacagcggccccagcgcggccaacaggccaagcacgacggcgtacaccagacgttgtctggctaagtgtttggtcatgggagattaagatttcctgaacaggtgagaaatggcctgctgatacagatcgcgcagcagggacgcatcggctttttgcgtggtaaggatacggtaaccggtgccttcgctcatgacggcgataaactccacccgggcggcgatctcttccgtgctgaaatcgggatacagccgctgcaggttgtggcacacgtggcgaaacagccgcgcttccgcatcgctgagcaatttggccaccaccgggttgcgcgtggcctcggcggtcacttccagcatcagcatgtgatcggtttcgctctcgcccggttgctgaaacagcgtgcgcgtcgccagcgtaccggcgatcaggttgatgtgatcgccaaggttttccaggcgctgcatcttgctggtgatgatgcggttgacgatctcttcgatgatcgcgtctttattggcgaaatagcgatagatttgcccgacgctaagctgcgagccttgggcgatctccgccatgctggcggcatggaagccgtggcggcggaagctggttttcgccgcttcgacgatctgatcgcggcgcgcctgcaccttggcctgtttactgtcgttgggggggagcatctgcccgatcctttgctacgcgtgagccgggttcacatttttgggtgtgaacgttcattctcaattgtagtgtaaccgaccggaaagacgcaagatgaacgcgtgctgcgataaaaggcgtttaagcgaacaggtaggatttgataaaggtggcgacgatcagcacgcacagcgcaacggcgatcgcttcggcggcggttttcggcaggctaaacatagcgatttctcatccagtcaggggtactggatgagattatgcgcatgcaagattaaggaaacattaagggcttagcgcccgttgacccacatcaccagcatgaaggccagcagcgtcatcgccagcgagccggccaggttgagcagcatgttggccagcgcccagccgaagcggccgtcctgcatcaggtataccacctccagcgaaaaggtggagaaggtggtcaggccgccgcagaatccggtggtgatcagtaatttccaggtgggatccagatgcgtcatgcgggtgaaaatcgccatcgccaggccgatgataaaaccaccgatcagattgaccatcagcgtaccgagcggaatgtgggcgttcagcggattcattttcatacttaccgcccagcgcaaaacgctgccgacgccgccgccgataaatacggccagtaaagagctcaacatggggcaactacctttcaatcagagaaattcacgaggctcggaaagggacaggcgtaacgctacgcgcctctctccgagaggttacgtagacatcatcagcctgtgaaggcggttagggaggaatgtcatctccagcgtgccgcacggcctttttcgccgcacccggtggatgttacacctaatgccgcctattttgtagtatcggcactctgcgaggtaaaacggatggaaatcagaacggcgcgtctgagcgaccggcacgctatcgctgaattaatggcggcgctggattatcccggcaccgaggcgtttctgacgcagcggatgcagcaacttctggcgcacccggacgaggcgttgctggtggcggagcagggcgaacaagtgctgggcgtgttgtcgctgcattttctgccgcagttggcgttggccggcgacattggccgcatcagctatttttgcgtcgacgatcgggcgcgcggcgcgggcgtagggcggcggttgctggcggcaggcgaggcgctggcgcaccgtcgcggctgcgatcggctggaagtccattgccacagccgccgcgagcgggcgcatgcgttttaccggcgtgaaggctttgtcgaagcgccgaagtattttgccaagttattaagtcagtaagttactcccctggcggcgccgccgtttccagccgattgcggccattctgcttcgcccgatagagcgcgccgtcggccgctttcagccagtccagatagccgcccagcgtagggtggaagttagcgatgccggcgctgatctgcagccgcagctgcggcgcctccttgaagctgaccgcgtccagccgctgctggatacggcgcagaacgatttccgcctgttcagcgctggtgttcggcagcactgcgccaaactcgtcgccgccgtagcgcccgacgatatccacgttgcgcatgccgatcagcagctcttccgccaacgccgccagggcttcatctcccagcggatggccgaaggtgtcgttgatggttttgaagcgatcgatatccatcaggatcagcgtggcgttatcctggtagcggcggcagctgtcgaactggcgatgcagcaggtgctcccagtggcggcggttatacaggccggtcagcccatcgcgggtgctgatgcgctgcagctcctgtttcttttccgccaaccgtttggcggtgcggtaggtcaccagcccaagcagcgtcggataaaggtagatcatcggcaggcacagatagatttgcagcgctgtgctgtgcgggtgaaatgggaagccgagcagcgcggcggtcagcgccgctgcggccagttgaatggccaatcctttgacaaacagcgctttgccggctgaagcgatgttattcatgctcatcatcgacaggatgacgatggcgggcagcgcgttgaacgccatcatcgccgcccagaagccgccgaaggcggagtcgatcaacaggttgcggatctcggctttgaaaggatctttggcgcggcaggccaggcgataggcgagatgcggccagagaaagccgtgaaaggccagcaatagccagaccgccgtgggcggagccaaggggtagagtgcggcgcaaacgcagataaagccgagccccagaccggcgacgcggggcagataggtgcgtttggcgaagctgaggccggattttcgggcatcgaaaatgggtggagcaatatacatccggcatctccctgataggcatcacggcagagtagcatgcgggtgataaactaagaatagtctgggattcacgctgcgggggtgcgtggtattcctgcgaccgatctcactctgttacatgttgctgttgtgcgagccgaaggaaagtcgctaaatattcgcaggcaaggtcagtttttctcgctgttcacgcagcgctctatgataagaaggtgagtatggaaggtatcagcattaccaaacttctggtgattgcggtgttggtgattttactgttcggcaccagcaaactgcgcacgctcggcgccgatcttggcgcggcgctgaaaggctttaaaaaagccgtaggcgacgacagtacgccgccggccgccggcaacaatgccgccgaaagccagtccgcgcagcagagcgtcgagaagaaagacgtttaatctcgtctgatggcgcacaataaaaaacggatgccttgcggacatccgttttttggcgttttcgccgtctttagcgtaacaaactattacgcgttatttcacttccatccctttggcctgcagatcggcgtggtaagacgaacgcacgaacgggccacaggcggcatgggtgaagcccatcgccatcgcttcttctttcatctcgtcaaactcggctgggctgacgtagcgctgcaccggcaggtggtgacggcttggctgcaggtactggcccagcgtcagcatggtcacgccgtggcgacgcagatcgcgcatcacttcaatgatttccgcgttggtttcgcccaggccaaccatcaggccggatttggtcgggatatccgggtgcgcttctttaaagcgctccagcagcttcaacgaccacttgtagttggcgcccgggcgcacctggcggtagacgcgcggcacgttttccaggttgtggttgaacacgtccggcggcgtggcggtgaggatctccagcgcgcggtccatacggccgcggaagtccggcaccagcgtttcaattttgatgttcgggcttttggcgcggatagccgagatgcagtcggcaaagtgctgagcgccgccgtcgcgcagatcgtcgcggtcaaccgaggtgatcaccacataacgcagcgccatgtcggcgatggtttgcgccagcttttccggctcgttggcgtccggcgcgatcgggcggccatgggccacgtcgcagaacggacagcggcgggtgcagatggcgccgaggatcataaaggtggcggtaccgtggttgaaacactcggacaggttagggcacgaggcttcctcacagacggagtgcaggccgttcttgcgcatcgcggctttgatgccctgaatgcgcgttgagtcggcaggcagtttgatcttcatccactcgggtttacgcaacagctcctgccgttcggtgaccaccgttttgaccgggatcagcgccattttgtcagcatcgcggtatttgacgccgcgttccatctgaattggtttactcataatcgtgcaggttccagttacgaagctcgaccgtctggtagccgagtaaatgaacaaattcctgtaccaggattgggtgtatgtcttcaatgccaacgccgggcgccagcgcgctgacctgcgtcatctgcatgccggcgtaaccgcaagggttgatgcgttggaaggggctgagatccatcgccacattcagggccaggccgtggaatgagctgcctttgcggatccgcaaacccaacgaacagattttctgctcccccacgtacacgccgggcgcatccggacgggcgcgcgatgcgaggcggaagtgggcgagggtgttgataaccgtatcttctatcgccgtgaccaattggcgtacgccgaccttattgcgcttcagatcgaccatcacgtacatcacctgctggcccggcccgtggtaggtcacctggccgccgcgatcgctctggacaaccgggatatcgccgggcatcagcacgtgttcggctttgccggcctggccctgggtgaataccgggtgatgctgcaccagccacagctcgtccggcgtagtctcggtacgactgtcggtgaagttatgcatggcttgggatacaggcgcgtagggctgcaaccccagctgacgcaaaatgatcttgtctggttgcaaaagagtcatcgtcaggttacagaagtggtaaagccattataccgggcgctccggctggcggccagcctttcgctgaccaaaaatgcgcaacccgggaagacgctgcgccatcccgggttgataagcagggttttatgctggaattacagcaccatacgaacaatttcaatgttgcccaactcctcgtacagggtttcgacctgctcgatgtgagtggcattgatggtgatggagaccgagtggtagttgcctttgctgcttggcttaacctgcgggttgtaatcgcccggcgcatggcgctgcaccacttcaactacctggtcaaccagctcaggctgcgccaggcccatcaccttgtaggtaaacgagcaagggaattcgagcagttcgttcagtttagttttttgcatgtgcgtgcgctccagagtgctagctaatctataaattataactcccgccggggcgggagttaatgttattcagtatatgggggcaatttcgcccgtttcaaccgttaaccgaaccagtggtggaacatcagtttgatgtagtccacgatgcggctgaagaaaccaccttctttcacttcgttcatcaccaccagcggacgctggtcgatggttttgccgtccagctggaagttgatgctgcccaccacctggtttttcgccagcggcgcgtgaatttccggcgtgttcagcacatagctggccttcagatctttcatgcggccgcgcgggatggtcaggtagacgtctttatccacgcccagctcaacgcggtcggcatcgccgaaccagaccggctcggaggcgaactctttaccgactttcagcggcgccacggtttcgaagaagcggaagccccaggtcagcagtttcttgctctcggcttcgcggcctttgtaggtgcggccgcccatcacggcggagatcagacgcatctggccttcggtcgccgaagccaccaggttgtaacccgccgcgtcggtgtggccggttttgatgccgtcgacgttcaggctgttatcccacagcagaccgttgcggttcatctggcggatattgttgaaagtgaactctttttctttgtaaatcgcgtactcttccggcacgtcgcggatcagcgcctggccgatcagcgccatgtcgcgcgccgagctgtactggccctgggcatccaggccgtgtaccgtctggaagtgagtgttctgcaggcccagcttgctgacgtaggtgttcatcaggttgacgaacgcatcctggctgccggcgacgtagtcggccatcgccacgcaggcgtcgttaccggactgcaggttgatgccgcgggtcagtttggagaccggcacgcgatcgcccggcttcaggaacatcagcgaggaacctttgaacaccgggttgccggtcgcccaggcgtcctggccgacggtcaccagatcgtcctggccgattttacccgctttcagcgcctggccgatgacatagctggtcatcattttggtcaggctggccggatcgcgacgcgcatcggcgttcatctcggccagcaccttgccggagttgtaatcaatcaggatgtacgcttccgcatcgatctgcgggacacctgggatcatggttttgatgttaacgtcatcggcatgtgcaacggaggctgcgctcattgcgataacggtgccgagtgcgatgcttttgattaagcgaaaagaagttacttgtttcatgatcgggactacaacatccgtgaaagtaaagttaaaaaacgagccacactatagcagatgcgatcccggcaggcattatccattcatctgactaattgcggttagtgcccttttagctgcaagaaaatgtttcagctaaataaccgcttaacagccgtgaatgcccgccgggtttaacgctcagggtgcagcagtaacgaaagactgttgttgcgcttcgctggccaggcgttgttgcagttgggccgcctgctgacggctgctgaacgggccgagctggacgcggtaaacattgccgttggccgctactttgcccggtacgccaaactgttggctcaggctttgctgccagctctgggcgcgctcggcgctgctcaacgcaccgacctgcaccacgtagccgccggaggaggaagcggcagccatgccggcagcggcagcgccggccgcgaccggtgcggctactgcggcggcttcaggctcggcactttccagcacgccggccggtaatgcgcttggcgcgccgaggaaaccactgcggccgttggcggcgttgccggcattcgcaggcgcgtcgtcatcggtgcgcagggtgctgttatcaatagggcgcaccgccgcgccgctggcgaccggcacgtcctgttggatcggggtgcccatgccgctggagccaagatccgggcgcgccggcaatgcgtagctctgtttcgccacgatggtgccgatggtgccagggccgctcagcgtgccgtccggcgccacgttgatgaaatcgactttgaccttggtgttgttggacaggttgagacgatcggcggcggcttttgacagatcgatgatacggcccttggtgtaaggcccgcgatcgttgacgcgcaccactaactgacggccgttggccagattggtgacgcgcacgtagcttgggatcggcagcgttgggtgggccgcagtcaggccattaggatcgaactgctcgcccagcgcggtggtgttgccgttggcctcttcgccataccaggccgccaggccggtctgcgagaagttctgcggatcttttacgatgcggtaagtatcgccattaaccttataatcctgcatgttattagggttatagggttcatattgaggctcgacgccgccgatttccaccaccgggccgttgtacggctgcggaggggcttgctgttccgtggtcggggcggtacaggcggagagcaacaccgccgcgacgccgatccaaagccattccttacgcattactcacctcttataaacttttagacagcattttccgatgcgtgtggatcgacatgatgatgccgaaaccggccatcaacactatcagcgccgaacccccgtaactgaccagaggcaaaggtacgccaactaccggcaaaatgccactgaccataccgatgttaacaaagacataaacgaacaaaatcagcatcaagccgccgaccatcacgcggccgaaggtggtttgcgccttggcggcgatcatcagcccgcgaatgatcaccagcaggtagagcgccagcagcaccaacaccccgatcagccccagctcttcggccaacacggcgaagataaagtcggtatggcgctccggcaggaactccagctgcgactgggtgccgtgcagccagcccttgccggacaggccgccggagccgatggcgatcttggattgaatgatgtgataaccggcgccgagcgggtcgctttccggatcgagcagcatcatcacgcggtcgcgttgataaccgtgcatcaggaagaaccacagcaccgggataaaggccgccagcgcgacggcggcgacggcgatcagtttccagctcatgcccgacagaaacagcacgaacaggccggaggcggcgatcaggatcgacgtgccgagatccggctgcgcggccaccagcagcgtcggcaggaagatcagcaccagcgcgatggcggtgtttttcagcgaaggcgggcagacgtcgcggttcataaagcgcgccaccatcagcggcacggcgatcttggcgatttccgacggttggaagcgcactacgccgagatccaaccagcgctgcgcgcctttactgatctgcccgaaggcgtccaccaggatcagcaaaatcacgcagaagatatacagatagggcgcccagctttcgtacacgcgcggcgggatctgcgccatgacggccatcacgatcagccccatgacgatctgcccgatcttgcgctccatcatgccgatgtcctggccgctggcgctccacatcacgaaggcgctgtagaccagcagagccaggatcagcagcaggaacgtcggatcgatgtggattttggtccagatcgagcctttttgttggctttcagtcatgttctaccttagtcaccttctacgccaggcggcagcggggcctcgcttggcaattgcgtattgttgtcgcccagcagaatatggtcgaggatctggcgggtgatggtgcccaccgccggaccggagccgccgttttccagaatgatggcgaccgacaccgtcgggttattgaacggcgcaaaggcggtcatcagcttgtgatcgcgcaggtgctccgccagtttatgggcgttgtaggtttcgtaaccgaagacctgtgcggtgcccgatttcgccgcggctttgtaagatgcgtccgcaaagtacttgcgcgccgtcccgttcggacggttggccacaccgtacatgccgtctttggcgatttcccagaagccggagtgaatatcgccgatctgcgtgttctcttcctgtttgaacggcaccagcgcgccgttgacgcgggtgctctgcagcaggtgcggcgttttgacggtaccgtcgttgatcagggtgttcagcgccttggccatctggatcggcgtggcggtccagtaaccctggccgatgcccaccggaatggtgtcgccctgataccacggttttttatagcgtttcagcttccattcgcgcgtcggcatcaggccggagcgctcttcggccagatcgatgccggtgtactggccgtaaccgaatttggtcagccagctcgacagccgatcgatccccatatcataggcgacctgatagaagtaggtatccgcggattcttccagcgctttggtgacgttcaggcggccgtgaccccattttttccagtcgcgaaagcgtttttccgagccgggcagttgccaccagccgggatcgaacactacggtgttcttggtgatcacgccggcgctgagtgccgacacggcgatataaggtttcaccgttgacgcgggcggataaaccccctgcgtggcgcggttgatcagcgggcgattcggatcgttcagcagaccctgatagtccttgctggaaatgccgtccacgaacaggttcggatcgtagctcggattggacaccatcgccaggatggcgccggtgcgcggatcgctcaccaccaccgcggcgcggctgccaaccagcagctgttcgatatagcgctgcagatcaagatcgagcgtcagatagacgtcctggccggcggaaggcggctgctcgtgcaattggcggatcacccggccgcggttgttgacttcaacctcttcgtaaccggttttaccgtgcagcgtgtcttcgtaatagcgttcgatgcccagcttgccgatatcgtgggtggcggcgtagttggccagcttgccgtctttgtccagacgctcaacgtcgcggtcgttgatcttcgacacatagccggtgacgtgggtgagggcggatccgtaaggatagtagcggcgctgatagcctttcacttccacgccggggaagcggaactgattgaccgcaaagcgggcgacctgcacctcggtcagcgcggttttcaccggaatggagacgaaacggcgcgagcgcttgcgctctttttcgaaattggcgatgtcgtcgtcagtcagatcgaccaccgtgcgcagcgcctgcagcgtggccttgagatcgtcgaccttctccggcatcagctccagctgataaatggtgcggttgagcgccagcggggtgccgttgcgatcgtagataatgccgcggctgggcgcgatgggcaccagtttgatgcggttttcgttggagcgggtgcggtaatcctcgacgcggaccacttgcagattatacaggttggcgatcaggatgccggacagcaccaggatgaccaggaacgccaccagggcgcggcgtacaaacagggcggattcagccgtatagtcgcgaaaagggttacgttctattttcatcccgctgctttatttcactctgtcacggtcaccaccggctattcccggtggtaaggatgatttgttgtaatactccaggcgcggtagaggctttcggccaccaggacgcgcaccaaaggatgcggcagcgtcaacggagaaagcgaccagctctgctcggcagcggctttgcaggcgggcgccagcccttccgggccgccgatcagcaagctgacattgcggccatcctgcttccagcgctcaagctgctgcgccagctgcggcgtttcccacggcgtgcctgggatatccagcgtaacgatgcggttgcctttgcccaccgccgccagcatctgttcgccttccttgtccagaatgcgcttgatgtcggcatttttgccgcgtttgccggccgggatctcggtcagctcaaacggcatatctttgggaaagcggtgcaggtaatccataaagccggtttgcacccagtctggcattttggtgccgaccgccaccaattgcagtttcaccgcttagctccagagtttttccagctcgtacaggcgacggctttcttcctgcatcacgtgtacgatcacttcgcccagatcgaccacgatccagtcggaggcttcctggcctttcatgccgtacagctccatgcccgcggcgcgggattcctgcaccacgtggctggcgatcgacatcacgtggcgcgttgaggtgccggtgcagatgatcatgcaatcggtgatgctggatttgccctggacgtccagagcgacaatgtcttggcctttcagatcatcgattttatcgatgacgaaatcttggagcgctttaccttgcaaaggttccccctcgggtgtgttctgttcagtcggctgcggcgggcaaaatgcgcgcgtcgcggcgtaaccggataatggtttcggcaggctgccgctgaaagccagctaactggtgactgcccggccagctaaggtttccggggttttcagcggatacctgaaaaatagcggcgcagtatatcacgcacctttcactagcgatataaaccctgcaactcgatatagcgctgcaccgggcgcggcagcaggtcgtcgcagttgaggccctgatggcggcgctggcggatctcggtggcggaaatttccagctccggcgtatcggccagatagatatggccgtgcgggcgacggctgagcagcgccgggtcggcggtgcgatggcgttccagccactgctgcagttccggcgtgtccatgcgatcgttatagcccgggcgcgccagcaccagcaggtggcagacgtccaacagcgcctgccagcggtgccacttatgcagcgtcagcagcgagtcctggccaataataaacgccagcggctgggcggcgccacgctctttacgaatcgtttccaacgtctcgatggtgtaggagggcgtggtgcggtgcagttcgcgatcgtcgaccgcaaacagcgggttgccggcgatcgccagctcgaccatcttcaggcgctgttgcgcattggcctccggctgcgggcggtgcggcggcacatggttaggcagcagcgtgacgcgattcaggcccacttcggcggccagcgcctccaccggccgcaggtggccgtagtggatcggatcaaaggtgccgccgaacagcgcgtgcaaaacggtggggtgttccgggttagtgggcatcgctaaaactcgtggccaggggtttgccgcacagcagcatcgacagggtttccagttccggccagaccgactggccatagtcctgcttgagggtcagctcgatttgcgtcagcagctgtaccgcctgctgcagctgggggccggacaggcgttgcaacgcctgggtcaccaacgggcggcggttctgccagaccttgtgctgatcgaacagcgagcgcagcggcgcagacgccatgcggcgctgcagcgtcagcagcagcagcagttcgcgctgcagggtgcgcagcaggatcaccggctccacgtcctcttgctgcaactgctgcaaaatatgccaggcgcgcttgctcttgccggccagcagggcatccagccagtggaacggcgtgaagtgggcggcgtcgttcaccgcctgctcgacgcgcggcagcgtgagcttgccgtccgggtgcagcagcgacagccgctccagcgcctgcgacagcgccagcaggttgccttcgtagcagtaacacagcagctgattggccgcgtcgtccaactccagcttcatcgctttggcgcgcgcggcgacccagcgcggcagctgcgcctgttcaggcgtctggcaactgacgagagcgccgtgtgggctgagcgccttgaaccaggcgctgttttcctgcgctttggtgaggcgcgggccgcgcaggatcagcaaaatatcctcgtgcagcagcgtggcgagtttgctcaactgctcaccgatcggcgccgtcgggccgttttccgggaagatcagcagcagcgtctggcggctggcgaacaggctcatcgcctggcagatgccgaagatggcgtcccagtcagtatgggcgtcgagggaaatgctgtagtgctcgctgaactgctgctgttgcgcggcctgccggagtaaatcctggctttcctgcagcagcagcggttcattgccgctcaataaataacaagcgcgcagcccctctcggagctgcgcggcaagttgttccggataaatgcggatcattgtgcggtttggcttgccgctcgttcgccggcggcagcggctttctgccggttttcttcttccgccgcgtgcacggtcagcagtttgcgcaccagttgttgcgctgcctgctcacgcatttcctggcgaatgatctcctgttcggagtccttggccagcgcggtcagcgggttgtcgaagaacgaacggaacactttcaccgacagcggatacaggtcgtggcccgggagcagcacctgcgcctgcacggtcagcaccagctggtactcggcggttttaccgtcctggaagatcgaggcggtatcctggctttccgtcgcgccgacgatgcgcagggaaggcacgtctttacgcttcggatcgctgacgatggtcacggcgttcaaacgcagctgctcacgcaccgcgcgcgtcaatggcccgtaaggatccgaactgtccaggatcagcgttttcatttcattaggcacctgcgtggtgccacgcaggtgaaaaccgcagccggcggtgaccagcaccgccaaccccagcaacagcgtcagaatacgttgtcgcacaactcctccttgtgttaacccacaaccaggttaagcagtttgcccggaacgtaaatcactttgcgaatcgtgacgccgtccagatatttagccaccagatgctcttcggcagcgcgcgcgcgcacttgctcttcggtcgcatcggcagatacggtgattttagcgcgaaccttgccgttcacttgcaccaccaccagcttggagtcctcgaccatcgcctgttcgtcggcaaccggccatggcgcggtgtccacgtcgccttcgccgcccagcgcctgccacagggtgaagcacacgtgaggggtgaacggatacagcatgcgcaccacggccagcagcgcttcttgcagcagcgcgcgatcctgctcgctctcctgcggcgcgcgggccagcttgttcatcagctccatcacggcggcgattgcggtgttgaaggtctgacggcggccgatatcgtcggtcactttggcgatggttttgtgcagatcgcggcgcagcgctttctgctcttcgttcagcgacgccacgtccagcggctgcaccgcgcctttttccacgtgatcgtaggccagtttccacacgcgtttcaggaagcggttagccccttccacgccggattcctgccactccagcgtcatttctgccggtgaagcgaacatcatgaacagacgcacggtgtccgcgccgtatttttccaccatctcctgcgggtcgatgccgttgttcttcgacttcgacattttgctcatgccagcatagaccagttcacggccttgcggatccgtagccttgatgatgcggcccttgtcgtcgcgctcgacggtggcgtcaaccggggatacccagacgcgctcgccgctgttgccggtgtagtagaaggcgtcggccagcaccatgccctgacacagcaggcgcttggccggctcatcggaatccaccaggcccgcatcgcgcatcagcttgtggaagaagcggaagtacatcaggtgcatgatggcgtgctcgatgccgccgatatattgatcgaccggcagccagtagttggcggcggccggatccagcatgccctggtcatactgcgggcaggtgtagcgtgcgtagtaccaggaggactccataaaggtgtcgaaggtgtcggtttcgcgcagcgccggctggccgtcgacggtggttttcgcccactcagggtcggccttgatcgggctggtgatgccgtccatgaccacgtcttccggcaggatcaccggcagctggtcttccggcgtcggcattacggtgccgtcttccagcgtcaccatcgggattggcgcgccccagtaacgctggcgggagacaccccagtcgcgcagacggtagttaaccttacgctggcctacgcccttggcgaccagtttgtcggcgatggcgttgaagcccgcttcattgtccagaccgtcgaactcgccggagttgaacagcgcgcctttgtcggtcatcgcttcggcgctcacgtcaggctggctgccgtcgaggttcaggatcaccggtttgatcggcaaatcatatttggtggcgaattcccagtcgcgctggtcgtgcgccggtactgccatcacggcgccggtgccgtattccatcagcacgaagttggcgacccacaccggcagcttctcgccgctcagcgggtggaccacgaacaggccggtcggcatgcctttcttctccatcgtcgccatttcggcttcggccactttggtgttgcggcattcgtcgatgaactcggtcagcgccgggttgttgcgcgcgccctgttgcgccagcgggtggcccgcggcgaccgccacgtaggtggcgcccatgaaggtgtcgggacgggtggtgtaaaccgtcagcttctcttcgctgtccgccacgtcgaaggtgatttccacgccttcggaacggccaatccagttgcgctgcatggttttcacctgctccggccagctttcaagcgtgtccagatcgttcagcagctgatcggcgtaagcggtgattttgatgaaccactgcgggatctctttacgctcgaccttggtgtcgcagcgccagcagcagccgtcgataacctgttcgttggccagcacggtcagatcgtgcgggcaccagttcaccgccgaagtcttcttgtagaccaggcctttttcatacagcttggtgaagaaccactgttcccagcggtagtattccggctggcaggtggcgatttcgcgatcccagtcgtagccgaagcccagcagtttcagctggttcttcatgtattcgatgttgtcgtaggtccacggggccggcgcggtgttgtttttcaccgctgcgccttccgccggcaggccgaacgcatcccagccgatcggctgcagtacgtttttgcccagcatgcgctgatagcgcgagatcacgtcgccgatagtgtagttacgaacgtggcccatgtgcagtcggccggacgggtaaggcagcatggataggcagtagtacttttccttgctgtcgtcttcggtaactttgaaagtctgcttctcttgccagtgaagctgtacgttcgattctatgtcttctggacggtattgctcttgcatggcggccggtggtcctgtaggtgtaaaccgttgccccggtcagaggcaacgcaatgaacatttagtattcgtagatccgcatagcatagctgataagacctcccggcaacaactccaagcgcctgactcggcgcatttaaaaaaaacgccgtcatgacgcggctcacaacctgcggatcccgcgtcttgccaagtgacatcagtcatttacggctaaaataagaacaagtagcttaggggggatccctacagccaagtccggcgcagcgtttattgaggagagtctatgaacaaggttgctcagtattaccgcgaattggtggcatcgctgagcgaacgcctgaaaaacggcgaacgcgatatcgatgaactggtggccagcgcggagcggcgcttgaacgaggccgaagatctgacgcgcgacgaagtgcggcaggtgacgcaggcggtgcggcgcgatctggaggagttcgctcgcagctatcaggagagccgggacgagtttaccgacagcgtgtttatgcgcgtgatcaaagagagcctgtggcaggaactggcggatatcaccgacaaaacccagctggagtggcgcgaggtgttcaaggatgtcagccaccacggcgtttaccacagcggtgaagtggtggggctgggcaatctggtgtgcgagcagtgtcactaccatttggcgttttacacgccggaggtgctgccgctctgcccgaaatgcggtcacgaccagttccagcgtcggccgtttgaaccttgatgacgttccccgccagggcggggaacgctaaggccggcgtttaacggaacagtttcttcagcaggttgctcaggaaaccgccgctgacggttgccggggcaacgtccgcctgcgccggtgcgctggccggtacggcgacgccggccgggattttttgcacgactgcgatgcggctgtcctgggcggctttctccgccgcttccgggccataggcgaagccttccgccagcacgaattcaacgtcggtgatgccgataaagcccaggaacaacttcacgtacggcgtgatcagatccgtcggcgtgtcggcgtggatgccaccgcggctggagatgacgatcgctttcttgcccgtcaccagcccttcggcgccggcggaggtatagcggaacgtctggccggcgcgggcgataagatcgaagtagatcttcagctgcgtcgggatgttgaagttgtacatcggggcgctgatgatcagcgtgtcgtgcgatttcagctcggcaatcagctcatcggacagcgccagggtgctttgctgatgcggcgtcagcggtttgtcgccggcggtaaagccggccatcacttcaccatccagctccggcagcgttgggttggccaaatcgcgcacggtgaacgtgtcttcagggtgagtttcacgccattgttcaacaaaaaaatcgactaattttccagactgggaatattcacccagaatgcttgatttcaggaccagtacgcggctcattggcttatctccaggcgaaggctaatcggtaacgatgtcagtcggtgtaaacacatggtagaggcaagccatgaacagtgatagcgcaaaaattcgctgagttaaatcaaaaaagttgaacgaggggcgcgagcgcgccccgataggatcaataacgcgctacgcgctcggccagcagatcgataaagccctcgcggttgatgccggtcagcacttccacgttggccgcgttgccggtttgctggaaatagtccaccaccgtcatgccgacggtgtattcccctttggtctccacgccgacccagcgttctacgccggtgaacagctgtggcgccagcagccaggcgatggtgcagggatcgtgcatcgctgcgccgggcaggccgcgcggatggctgaggtacagcggcagataaaaatcgagcatctccgcgaccgcctgcgcgaccggattgtctatctgacgaatgcgctcgatatcctgcggcaacaccagcgcctgatgggtgacgttcagcccggccatggtcagcggtacgccggatttcagcaccatttcggcggcttcgggatcgacgaagatgttgaactccgccaccggcgtagtattgccggcgttcatgccgccgcccatgaatacgatgcgctcgatgcggcttttcaactcggcatgctgggccagtagcagggcgatattggtcatcgggccggtcaccaccagggttatcggctgtgggctggcgcgcagcaggtcggcgatcagctcgacggcgccgcggggatcgggtttgagggtcggcgtcggcaggtgggtgttgcccatgccggttttgccgtggacatagtcggcgatcaccagctcgcgcatcagcgggccgccggcgccggcggcgaccgggatgtcctcgcgctgcatcagggtcagcaggcccagcgcattatgcagggttttctccggcgtctggttgccggcggaggtggtaatggctttgacgtccagctccggcgaacgcagcgccatggccagcgcgatggcgtcgtcgaggccgggatcgcaatcgatgataatagggcggggcatgttctttctcctctgtttgttatccagcgagcatcggatcaaaaccggggagaaacaagcgcttttagtgccgggagaaaagatgcgcccctggcggggcgcatcgagagcgtttagtgcaggatcttggccaggaagtccttggcgcgatcggactcggggttgttgaagaaatcgtctttgttgcggtcttcgacgattttgccttcgtccataaagattacccgattcgccaccttgcgggcgaagcccatttcgtgggttaccaccatcatggtcatgccttcgttcgccagttcgaccatcacgtccagcacttcgttgatcatttccggatcgagcgccgaggtcggttcatcgaacagcatggcgataggatccatgcacagtgcgcgggcgatggcgacgcgctgctgctggccgccggacagctggccggggaacttgttggcatgggcggagaggccgacgcgttccagcagcttcaggcccttctcgcgtgaggcggtcttgtcgcgcttgagcactttcacctgcgccagcgtcaggttgtcgatgatagacaggtgcgggaacagctcaaagtgttggaacaccatgccgactttggcacgcagctgcgccaggttggttttcttgtcgttgaccgaggtgccgttcaccaggatgcttccctgctggatcggctccaggccgttgacggttttgatcagggtggatttgccggaacctgaaggaccgcagacgacgaccacttcgccttttttcacttcggtggtgcaatcggtcaacacttggaagtgaccgtaccacttggaaacatttttcagggatatcatcaaacagtccttttcttcaaatagcttaccagcgcagaggcggcgaggctgataacaaaatagacaaaaccggcgaacaggatcatttcaacctgggtgccgtcgcgttcgccgatggtcgacgcggtgcggaagaagtcggccaggctcagtacgtaaaccagcgaggtatcctggaacagtacgatgccctgggtcagcagcagtggcaccatggcgcggaacgcctgcggcaggatcaccagccgcatggactgccagtgggtcatgcccagcgccagcgcggcggaggattggccacgcgagatgctgatgataccggcgcggatgatttccgagtaataggccgcttcaaacagggaaaaggctaccatagccgagatcaggcgaatatcggttttcggcgacagccctagaacctgttgtaataagcttggaaccaccagatagaaccacagcagcaccatcaccagcggcaccgaacggaacaggttgacgtacagggtggcgaaccagcttatcggcttgaacggcgacagacgcatcaccgccagcacggtgccccacaggatgccgaccacgatggcggtcacggtgatcttcagcgtgatcgccatgccttgcagcagataagggaagcttgggacgatcgacgcccagtcaaattcgtacattatttactccccaggttgccaggcaactgcactttcttttcgaccagacgcataaacagcatgataacggcgttgatgccgatataagccagcgtgatggcggtaaaggattcataggcgtgtgcggagtaatccaacagcttaccggcctgcgcggccatgtccaccagcccgatggtggaggcgatggcggagtttttgaccaggttgagcatttccgaggtcatcggcggcacgatcacccggtaggcgttcggcagcagcacgtagcggtaggtttgcggcagcgtcaggcccatcgccagcccggcggctttctggccgcgcggcagggactgaatggcggcgcgcacctgttcgcaaacgcgggcggcggtaaacagccccagacagagcatggaagagacgaagaactgcacgttgggatccagctcggttttgaaccaggtgccgatattggccggcagcagctcggggatcaccagataccaggtaaagaattgcacgatcagcggcacgttgcggaacagttcgacgtaacaggtgccgagggtggaaagaaagcggttgggcacggtacgcaagataccgaacagtgaaccgacgaagaaagcgataatccaggcacagacggagagggccaccgtgacctgaaagccggaccagatccagccgaggtaagtggtgttcccaaacggggcctgctgcaggaagataccccagttccaatctattgacataacaaactccgataaacgggcgcagggcgccgaagattgatgacttgatgagcgccgatcgccgcgcggccagtctggctggcttgttgtgtacgggtgtcggtgatgcgccttggggaaaatgagggaggggaacggcccccctcattcctgtctgtcccagtcatcaactgggccggtttggcctggcggccgcgccggcttttgttctatttagttcaacgctttgtcgtttggctctttgaacagttgcttcatgtcgtccgacagttcgaagttcatgttgaggtttttcggtggaataggctgcttgaaccatttctcaaaccacttggccgcttcaccggaggtttgcgcctgggcgatggtgtcatcgaccagctttttaaactcaggatcgtctttgcgcagcatgcagccgtaggcctctttcgactgcggcgtgccgatgatttcccactgatccggtttcttggccttggcgcgttcgcccgccagcagggcatcatccatcatgaaggccacggcgcggccgctttccagcgtgcggaaggaatcgccgtggtctttggcgctgatgatgcgcatgttcatcttgtcgctgtcgttcagcttgttcagcagcacttcggaggtggtgccggaggtgaccaccaccggtttgccggccaggtctttaaagtctttgatgtcggagccctttttcaccagcaagcgggtgccgaccacgaaaatggtgtcggagaaggcggcctgtttctggcgctcgaggttattggtggtggatccgcactcgaaatcataggtgccgttttgcagcagcgggatgcggttctgcgaggtaatcggcagcattttcacctgcagattcggcgcattcagctttttcttaacggcttcaacgatttggttggagtagtcctgagagtagcccacaactttttgttggttgtcgtagtaggagaacggcactgacgattcgcggtggccgacaacgatcacgccattgtctttgattttcttcagcgtaccggtcaggtcttccgcatgcgccacgctacctgccgcaccgagcagcagtaacgataacgccaatttacgcatttgcatggtccaactcctttgctgttgttgtggctctgactaaagagcgtcaggttaaatcgactgtttattgctcaagttataaagatagtcttatgaactgaacgctgttaaaaaataaccgattgtgaacaccttgaaactaaaatgtttcattttttgagacgccgcgcgcaccaaatcaatgcaacaaaacgtcggcgcacccgcgcggtgcgcttaatgcacccaaaatgtgcgtaggtgcgacaaaacgtcagcaaaagtaaaccggcgcgcgatgtcgccatagataaaagcaaggagtgtgccagccgcgttgatttaacgacgttttctgactgaggcggggatattgacgggaacgcggggcgcggcgggcgcgccccggcgaagaggattatttgcggcgcaagcccaacatcagcgcccagccgcccagcagcagggtaatcacccacagcggtgtggcgccgaaacgcgcataaggcgtgacgccggtggtcggcgtgaccttcacttcgagcacctggcgggtaaactgcgggatctcggcgatcacctcgccgttggcatccaccgcggcggtgacgccgttattggtgctgcgcagcagcggccggccgagctccagcgcccgcatgcgcgccatctggaagtgctgccacgggccgatggagtggccgaaccaggcgtcgttggagatggtcagcaggaagttggtgtccgggcggaagttatcgcgcacctgctggcccagcacgatctcgtaacagatggccgccgtcaggttgtagccgcgtacgctgagctgcggctgcacgtagtcgccgcggctgaaaccggacatcggcagattgaagaacggcgcgatagggcgcagcagttcacccagcggcacaaactcgccgaatggcaccaggtgatgcttgttgtagcgatctttggccgggtagctgtacggcgtcggttcgcccagcacgatggcgctgttgtattcctgcacgccttgtggggtggcgcgcgcatcgacgatgccggtgatcaggctgctgttcttcgcccgcatcaggtcatccatcatggtcaggaagccgttctgacgcggctcgaagtcagggatggcggactctggccagatgatgatcggcgccttgcccatgtaggggcgggtttcgtccagataggtttgcagcgtgctgagcagaatgctcggatcccacttcattgactggggaatgttgccttgcaccatggcgacgttcaccgctttctccggctgcggggtaaaccactgcagctggcgcagcggccacggcaacagcagcagcgcggcggcgatcacggctgccgacaggcgccgttgattgacggcgtacaccagcaggccggcgatggccatcagcacaaaggtgatggcgtcaacacccagcagcggcgcgatgcccttcagcgggccgttgatctggctgtagccgaactgcagccacgggaagccggtcagcacccagccgcgcaggaattcggtcacctgccacagcgccggcgcggcgatggccagccgccaccaactggtggccggccacaggcgcgtcagcagcccggcgaacagcccggtgtacagcgacaggtaagcggcgagcagcaccaccaggaagacgttgacggcgaacggcatgccgccgaaatcggcgatgctgacatacacccagttgatgccgctgccgaacagcccgaagccccagacaaagccgagcagggcggactgtttggtggtgcgattgagggtaacggccagcaggccgaacagggagacgatggccgcgggccagaagtcgtagggcgagaacgccagcgtcccgccggcacctgacaacagcgccagcagggcgcgaacccgctggcgttcaagtaatgaggctttagccatgttggatttaatcttccagtttcggtggtggagaatcgtccggaatttttacatgaacctggatgatacgtcgactgtcggccatggcaactttaaataggtaaccttcgatttcaatggtttccccgcgcgccggcaggtggccgaaggcctgcatcaccagaccgccgatggtatcgacctcgtcatcgctgaagtgggtgccgaaggcttcgttgaagtcttcgatcggggccagcgcgcgcacggtgtacatgtggcggctgagctggcggatatccagatcgtcttcgtcgtcgtattcgtcttcgatctcgccgacgatcagttccaggatatcttcgatggtgaccaggccggacacgccgccgaattcgtcaatgacaatcgccatgtgatagcgctgggagcggaattctttcagcatccggtcgacgcgcttgctttccggcaccaccaccgcggtgcgcagcaccttgtcgatgctgaacggctcggaatctgcgcgcatgaacggcagcagatccttggccatcaggatgccttcgatgtgatctttgtcttcgctgatcaccgggaaacgcgagtgggcggagtcgataatcacgtccaggcactcttccagcgtctggttgcgcttgagcgtcaccatctgggagcgggggatcatgatgtcgcgcacgcgctgttcggcgatatccatcacgccttccagcatgtcgcgggtatcgggatcgatcaggtcgttttgttcggaatcgcggatcagctcgaccagatcgccacggtttttgggctcgccgtggaacaactggttaaggataagagtaaagaaccccttcttgggactggggctgtcattgctttgtgaatggtcgtcgctcatggcgttttcgttactgtcactcatgtcagagttaaggggcgtcagcgacagccccgcagaggggctgtagggtaaacggctgacgtcagacggggtctttttccgccaggtacggatcaggatagcccagtccgtgcatgatttcggtttccaaagactccatttcttcggcttcatcgtcttcgatgtggtcataccctagcagatggaggctgccgtggacaaccatatgcgcccagtgggcctccagcgccttgccttgctcaatcgcttcctgttcaaccacctggcggcagatgatcagatcgccgagcagcggcagctcgatgcccggcggggcttcgaacgggaaagagagcacgttggtcggtttgtctttgccgcggtaggtcaggttcagctcgtggctttccgcttcgtccaccagacgcacggtcacctcggcctcttcctgaaattgcggcagcacgccttccagccagcgctggaaggtggcctcgtccggcaggccgtcgctgctttcacaggcaatctgcagatccaaaatcacctggctcatggtgtctcctgctcggaggcggcgagcgcctcgcgcttacgttgttcggcaatcgcgtctttgcgtttctgttcggccgcttcccaggcctcataggcgatgaccacgcgggccaccaccgggtggcgcaccacgtcttcgctgtggaagaagttgaagctcagctcttccacgtccgacagcacttccaccgcgtggcgcaggccggatttctggttgcgcggcaggtcgatctgggtgacgtcgccggtgatgaccgccttcgagttgaaaccgatgcgcgtcaggaacatcttcatctgttcgatggtggtgttctggctctcatccagaatgataaaggcgtcgttcagcgtgcggccgcgcatataggccagcggcgcgacttcgatcacgttgcgttcgatgagcttctccacgcgctcgaagcccagcatttcgaacagggcgtcgtacagcgggcgcagataaggatcgaccttctggctcagatcgcccggcaggaagcccagcttttcgccggcttcgaccgcgggacgggtcagcagaatgcggcgaatttcctggcgttccagcgcatccaccgcggcggcgaccgccaggtaggttttgccggtgcccgccgggccgatgccgaaggtgatgtcgtgatcgagaatgttggcgatgtattgcgcctggttaggcgtgcgcggtttcaccatgccgcgcttggttttaatggtgaccgccttgccgtaatccggcacgctgtcggccacctgttccagcacccggctctctttgatcgccagatggatttgctccggatcgatatccgggatcacgccgcgaatcggcgcggtatccacgtaaagatggcgcaggatatcggcggcggcgaccacgcacaggttcttgccgaccagcttgaaacggttgtcgcggcgattgatttcgatgcccaatcggcgctcgagttgcttgatgttgtcatcaaacgggccgcacaggctgagcaaacgctggttgtctgcgggctctaacaaaatttcttgtgttgcgacgttcaaactattcctctaggtcacatcgggcctggttgatgtcacatagcgcgtccgggacgcgcgcgttcaggacgagcctgaatactctctttcttgaattattcatggtgcgccgcaacggcgcaagtttaccgctgatctatctgtgcgccgtcggcggaattcaagggaagacaaggaaaaaacgcggcggggcgcaaagcccgccgcgtcatcacaggacaagatcgctgggaatcagttctttttcacgaattcggatttcagtttcatcgggccgaaaccgtcgattttgcagtcgatgttgtgatcgccttccaccagacgaatgtttttcaccttggtgccgattttcagcatcgaggaactgcctttgaccttcaggtccttgatcacggtgaccgcgtcgccgtccgccagcaggttgccgttggcgtctttgacgatcagcgcgtcctgatcttccgccggggcgctgtcgctccactcatgggcgcactcagggcagatgaacagggcattgtcctggtaggtgtattcggagttgcacttcgggcagtgtgggagttgcatgttatgtcgcctcttcaacaataaaaaaataaaaaaagaacatcaccgggcgcggacgcccggcggagaaacggtaaggagtagcgcgaacgggcggcgataaggcggccgccgcggcgtcagggctggtaaatgccgacgcccagcgcgttttctttgcgggtacgggcgatcaccgactgcggggattcatgtacgcgcagatccatctgctgctcggtgcgcaccactgcgccacgcagggtgttggtcagcacctcggtaatttccacgtcgacaaactggccgatcatgtcgggcgtgccttcgaagtttaccacacggttgcattccgtgcgcccggccagttccatcacgcttttgcgcgaggtgccttccaccagaatgcgctggacggtgccgagcatgcggcggctgaactgcagcgcctgctggttgatgcgatcctgcagaatgtacagccgctgctttttctcttcttcgctgacgtcgtcaaccatgtccgccgccggggtgcccgggcgcgacgaatagatgaagctgaagctgacgtcgaagttgacgtcggcgatcaggttcatggtctgttcaaagtcggcctggctctcgcccgggaaaccgacgatgaaatcggagctgagctgaatgttcgggcgcgccttgcgcagcttgcggataatcgccttgtactccagcgcggtatgcgcgcgtttcatcatggtcaggatgcgatccgaaccgctctgcaccggcagatgcaggaagctgaccagctccggcgtgtcttcgtacaccgcgatgatatcgtcggtgaactcgatcgggtggctggtggtgaagcgaatgcgatcgatgccgtcgatggccgccaccaggcgcagcagttcggcgaacgagcagatatcgccgtcatgcgtggcgccgcggtaagcgttgacgttttggccgagcaggttgacctcgcgcacgccctgcgccgccagctgggcgatttcgaacagcacgtcgtcgctcggacggctcacttcttcaccgcgggtgtaaggcaccacgcagaaagtgcagtatttgttgcagccttccatgatcgacacgaacgcggtcgggccttcggcgcgcggttccggcaaacggtcgaatttttcgatctccgggaagctgatgtcgaccaccgggctgcgggtgccctgaacgtggttgatcatttccggcaggcggtgcaaggtctgcgggccgaataccacgtcgacgcagggcgcgcggctgcggatcagttccccttcttgcgaggccacgcaaccgccgaccccgatgatgacagacgggtttttttctttcagcaagcgccagcgccccagcatggcgaaaactttctcctgcgctttttcgcggatcgagcaggtgttcagcaacagcacgtccgcttcttcggcgttgtcggtccactcgaagccgtgcgtgctgttcaacaggtcggccattttcgatgaatcgtactcattcatctggcagccccaggttttgatatgtagttttttcgtcattgacttgccattactcagtgcggagcgaaagttgcgttacgcgacatgcagggcgcgtattgtaatcatttgccgccgttgtgaccagcgcgggggaaaatggcacgcaacctgaagccgaagcgaaaatccggtacactgcgcaaaacgccatgccgggtgggatggtgagcattcacacagaaaacatagccaatatgaagacatctcaaaatcggtatgacgcggtggtggtgggcggcggtatggtcggcgcggcggcggccctcgggctggcgcaggcgggctggtcggtggcgttgctggaacatcaggcgccgcaggcgttcgaggcgcaaagcccgccggacctgcgcatttccgctatcggctgcacctcggtggggctgctgaaacagctcggcgcctggccggccgtgacggcgatgcgcacggcgccgtatcgccggctggagacctgggaatgggcatcgtcgcgggtggcgttcgacgcggtgtcactggggctgccggagctgggctttatggtggaaaaccgtattctgcagttggcgctgtggcagcagttcgcgcagtgcgccaatctgacgttgctgtgccccgccaggctgcaatcgctgcagcgggcggacaaggcctggcagttgacgctggacagcggtgaaacgctgcaggcgcggctggttatcggcgccgatggcgccaactcgcaggtgcgcaagctggcggcgatcggcaccaacggctggcagtatcgtcaggcgtgcatgttgatcaccgtcgataccggcgcgccgcagcaggatgtgacctggcagcgcttcttcccgtccgggccgcgcgcctttctgccgctgtacgacagctgggcatcgctggtgtggtatgacagcccgcagcgcattcgccagctgcaggcgatgccgccggcgcagctggagcgtgagatcgccaccgctttcccggcgcggctgggcccggtcaaggtgcacgccgccggatcgttcccgctgacgcggcgtcatgcgcagcgttacgtgctgccggggctggcgctgctgggggatgcggcacataccatcaacccgctggccgggcagggcgtcaatctgggatatcgcgacgtggatgccttgctgagcgtgttgagcgaggcgcgggagcagggagaggactggagcagcgaggcggtgctgctgcgttatcagcgccgtcgccgtaccgacaatctgctgatgcagagcggcatggatctattttataccgccttcagcaataacctggctccgctgaacgtggcgcgcaatctggcgctgatggccgcgcagcgggcgggcaagctgaaagaacatgcgttgaagtacgcgttaggattgtaaccgacagggctcagcggcggctgggcctattaaggatggctgaacgccagacagcaaaaagcccgccgaagcgggcttttctaaatatggctggggtgccaggattcgaacctgggtatgctggtatcagaaaccagagccttaccgcttggcgacaccccaattatggtggctacgacgggatttgaacctgtgaccccatcattatgagtgatgtgctctaaccagctgagctacgtagccgatgttactttttacttctttgatttgcaagcagtttgttatggctggggtacctggattcgaaccagggaatgccggtatcaaaaaccggtgccttaccgcttggcgataccccacctgcaaacaaatcttatgttgaaaccccgttcccgaaagaatatggctggggtacctggattcgaaccagggaatgccggtatcaaaaaccggtgccttaccgcttggcgataccccatcaacatactgcgccgacgatgaagagaaatggtgcgggaggcgagacttgaactcgcacaccttgcggcgccagaacctaaatctggtgcgtctaccaatttcgccactcccgcaaatgcaaaaaagagatggtggctacgacgggattcgaacctgtgaccccatcattatgagtgatgtgctctaaccagctgagctacgtagccctctttttttgctttgccttcatcggcgttgcggggcgcattatgcgtatatgaccgatttgcgtcaacaagttttttcccgaaaaagcgcccggaagcgccgtttgtctgggttgtgaacattatggcgataaaatcggcaattcaggcagttggcgggcggaaaaggcaacaaaaaggcgggccaaaaggcccgccccaagggaaaacgccgcgcgtttatttataggcggcctggtgcacgccgacggcgcggccggaaggatcgtccatcttcttgaacgattcatcccattcgatggccttggcggacgagcaggcgacggatgggccgcccggcacgcattcggcggcgctcggcagcgggaacagctcttcgaagatctcgcggtacaggtagccttctttcgaggtcggcgtgttgtacgggaagcggaaacgcgcggtttcgagctgttgatcgctgatttgctgcgcagccacctcttttagcgtgtcgatccagctgtagccgacgccgtcggagaactgctctttctggcgccaggccacgctggccggcaaataggactcgaaacattcgcgaacgatgtgtttttccattttgccgttgccgcacattttatctttcgggttgatgcgcatcgccacgtcgaggaatttcttgtccaggaacggcacgcgggcttcgacgccccaggcggacatcgccttgttggcgcgcgcgcagtcgaacatgtgcagcgccagcagtttgcgtacggtctcttcgtggaattcgcgggcgtccggcgccttatggaagtacaggtagccgccgaacacttcgtccgcgccttcaccggaaagcaccatcttgatgcccatcgccttgattttgcgcgacatcaggtacattggcgtcgaggcgcgaatggtggtgacgtcgtaggtttcgatgtgataaatcacgtcgcggatggcgtccaggccttcctgtacggtgaagtggatttcatggtgcacggtgcccagatggttggccacctcttgcgcggcgcgcagatccggcgagccctccaggccgacggcgaaggagtgcagctgtggccaccaggcctcgctgcgttcctgatcttccacgcggcgcgcggcgtacttcttggtgatcgccgaaatgaccgaggaatccagcccgcccgacagcagcacgccgtaaggtacgtcggacatcaggtggcttttcaccgactcttccagcgcggtgcgcagggtggcggcgtcggtcacgttgtccttgacgctgtcgtaatcgaaccaatcgcggcgataatattcacgaatctcaccgtcctggctccacaggtagctgccggccgggaattccttgatggtgcggcacaccggcaccagcgctttcatttccgaggcgacgtacaggttgccgtgctcgtcgtggcccatgtacagcggaatgatgcccaggtgatcgcggccgatcaggtaggcgtctttttcggtgtcatacagggcgaaggcgaacatgccttgcagatcgtcgaggaagtccgggcctttctcctggtacagcgccaggatcacttcacagtcggaaccggtctggaacgcgtagcgttcgctcagctgttggcgcagcgcctgatggttgtaaatttcgccgttgaccgccagaacgtgggtgtgcgcagcgttgtacagcggttgagcgccattgttgacgtcgacgatcgacaggcgttcgtgagccagaatggctttgtcgctggcgtaaacgccggaccaatccgggccgcggtggcgcatcagacgtgacagctccagcgctttcttacgcagttcaacgggatcggacttcagatcgagcacaccgaaaatagaacacatacaactctcctaacgggcttttatgactgtgatgttgttttttactgttatgggcagcattgccgatttatcagcgataacccggttttgctgcgctgtggttatgaaaatgcgtcaaaagctgcgggagatgcaagcgttttagccatgcgttgagaaatagttgtttgcttaggtgtggtttttaacggatgttcagttatcgacgtgaaaaattatcgattatgcaatttttagcgtgatggcgggattgccggccagtttggccggcaatcgattagcgattaggcgatgagctgccacagggtgaaggcggcgtccggcgtccagccggcgttggaggtgtgcgcctggatacaggtatatttcttgcctttatagctcaccacgtcgccagccttgtaactgtggttgttctgccactcgggcgcccccggatcgggcggcgtgccgtcgttggcggttttgaccgccagcgcgctgctcggcagcgaggtattgccctggctatcggtcgcggtaacgaagtagctgtactgggtcgccggcgtcagaccgccgtcagccagcgacagaccggcggtctggccgatcgggttgccgttgcggtagacggtgtaactggcgatcgggaaagcgccggtggcggcggcccagctcagtttcagcgaggtggcgcccagttcggcgaccgtcagcgccgtcggcgcattaggctttcccggcggcggggtgacgccgccctgaatcagcggcgcatagcgggttttgaactcccaattgtaggcgacgccggctttgctcttgccgttatcccagttgattgaccaggtcatcaggcccttgatcgacaggtttttggcgtcgagacgcgagaaagcgttatacaccgcctgtttgttgaccacgtagccggtggcggcggcatcgttgttgctcggcaggccgatgacgaatttcgccgccgggatcttcgcatagccgcgggtgccggtaaccaggctttccgtcaggtagtagaggaagtcctctttcatggcgtcgttattctgcgtgatccaggcattgagttcatccacccaaataccgtcgccgccctggttataatattgcggcgcgataaagtcgtaatagccttcgagggcattaatataatccaggtaggtgccgttggtgcgtaaatacgggaattccggcgccatgctgataataaagttttttccctgcgcggcgtaatggtcttttacttttttcaacgccgcaggcaagacggttttattattggcggcgccgatcgccgcctgttccagatcgatatccaggccgtcgaagccatagacttccaccaggcgaataatctcgtctttcagcttgtcttcgtcgccggttttcagctcgatatgcgcatctgcgccgccgagggagatcagcaccgcgcggccctggctgttcagcacgcccacctggcggcggaactcggtgtcggacaggttgtaaggcttgaaggtcgggatgccctggcctttcataaaggcgacggccaccacgttgtactcggtgggaatgtcggtcaggttcatattggcgaactgcccttgctggtagccgtcactggcgccggcggcccagttgtgccagaaacccatcaggatctttttattggcgatagacggcataatggccgcgtcatcggcggcgacggcattaataatgttatttgtgctcatggtagcctcattaattaggggtaagggttttccgctcgccggcaatatcagctattggcggggcgtaacgttataatgaggatttttaacgcaggcaggctgaaaccttttacggccatgaacgaattaaattcaaactgacgctgggggagaaggaaataacggcggccgggcggccgccatggtcgcatcagaagatggtgatatcggcgacggaagggtaaacgtagctcgggcggaacggcatggtttcgatgtcgctcagcgtggagacgccggacagcaccagcacggtttccaggccggcctggaagcccgccagaatgtcggtgcgcaggttgtcgccgacgatcaccgtctcttccgagtgcgcctgcattttgttcagtgcggcgcgaatgatccacgggctgggcttgccgacataaaacggcttgcggccggtgatcttctcgatgggcgcgcacagggcaccgcaggccggcgagaagccgtggccgtggctatccggattagtcgcgataaagcgcgcgccgttactgacgaagtaggcggctttgtgcatcatgtcccagttgtaagagcgggtttcaccgacgatcacaaaatccgggttgatgtcggtgatggtgaaaccggctttgtacagctcatggatcagcgcgccttcgccgaccacataggcttttttaccttcctgacggcgcaggaagtcggcggtggccatcgccgaggtatagaacgcgctctccggcacttccagcccggcggcggcgaagcggttcgccaaatcctgtgcggtctgtgatgggtagttggtcagcaccaccagcggcatgccttgttcctggatgcgcgccaggaacagatcggcgccgggcaccggcgtattgtcatgcagcagcacgccgtcgatatcgcatataacgtttttgattttcatttgtcgctgtttctcatgattacggcaggcaagaagtgacgataacacacctgccagaagcggcggatcagctttccagcaatcgctgcaagagcacgccgttgagcatcgcgcgtttggccagggcgaaagcgccgatcgccgagcgatgattgagttcggaggtcaccaccggcagatttttgcggaagtccttcagcacctgggtattgatgcagctctggatcgccggcagcagcaccttgtccgcttcggtgatctcaccggcgatcaccaccttctgcggattgaacaggttgatggcgatggccaccgccttgcccagatagcggccgacgtgttcgatcacttcgctggccagcagatcgccgcggttggcggccttgcagatggcgttgatgccgcagtcttctagcgtcagtttgctcgggtagccctggctcagcagctggcgcacgcgctgttcgatcgccgcgttggcggccaccgtttccaggcagccgaagttgccgcagtggcagcgttcgccgagcggatcgatctggatatggccgatctcgccgacgttgccgttgttgccgagaaaaatctgcccgttgacgatgatgccggcgccggtgccacggtgcaggcgcaccagaatcgagtcttcacagtcgcgggtggcgccgaagtagtgctccgccagcgccaggctgcggatgtcgtggccgacgaagctggtgacgttgaagcgctgctgcaggttgtctaccagcgcccagttgctgacgctgatgtgcggcatatagcgcaccacgcccagcgccggatccaccaggccaggcaggatcaccgcgatggcgatcagttcgcgcaggcggcgctggttcgcttcaatgaattgggcgatggcggcaaacagcgcattctccagcgtttcctgggtgcgttccggaagcggatagtgttcttcgctgagcgatttaccgctcatgtcatacagggtgatggtggcgtcgtggcggccgagacgcaccgcgacggtatggaaatgacgggtttccgacacgatggagatcgcgcggcggccgccggtggaggcttgctgatcgacttctttgatcagcccgcgctccagcagctggcgagtaatcttagtgacgctggcgggggcgagctggctgagttcggcgatttgaatgcgcgagatcgggccctgttggtcgatcaggcgataaactgccgcgccgttaagttgtttgactaagtcaacgttccctatttgtgcttgtccgccagtgctcatcaataatgttactcgctgttcattgaattaaacctcgttaccgttaacgagcgttttggtgatcttgaaatcacgggtgaaggcggtcaggttagccaccttgccggcttcgatggtgcccagacggcgatcggcgccgatcgcgcgcgccgggtacagcgtcgccatgcgcagcgcttcgtccagcgcgatgccgatatgctcgacgctgttttgcaccgcttcgatcatggtcagcgcggaaccgctcagggtgccgttctcatccacgcacagcccgtcccgatagtatattgttttaccggcgaaaataaattggtcaatatctgcacccgccggtgcggtcgcgtcggtgaccaagaccaatttatcacctttcaggcgtttggcgttacggatactcgcccaggccacgtgatggccgtcggcgatgatgccggtatagacctccggcgtatcgaagatagcccccatcagccccggttcgcggccggtgatatacggcatggcgttgtacaggtgggtggcgaagctgataccggcggcgaagccggtgcgcgcctgatcgtaggtggcgttcgagtggccggcggagaccacgatgccggcctcggtcagctgcttgataaagtgcggctcaaccatttccggcgccagcgtcaccttggtgatcacgtcggcgttggcgcacaggtaatcgatcatgtcctgggtcggcttgcgaatgaacgccgggttgtgggtgccttttttcaccgggctgagatacggcccttccaggtgcaggcccaacgcctgattttggtgctttttcagataagcgcgcatcacgtcgacgctatgcttcatgaattcgtcgctgctggtgatcagcgtcggcagatagctggtgcagccggatttctcattggcgcgctgcatgatctccagcgtttcttccgagatcgcttccagcgaatcgttgaactggacgccgccgcagccgttcagctgcacgtcgataagcccgggggccaggatggcgccacccaggtcgcgcgtttcgatgccggcgggcaattcagccaccgggcagactttctcgatcagcccatcagcgataatgactgcatggtcatcaagtacgtcgtggccggtatagattcggccgtgggttaaagcgaacatcgtagccccctgcaaagattaaagacttttcacgctttccgcttctaactcgcggaagtatttgacggttttgactttcagttccatggtggccggttcgtcgcacaccaccaccgctttggcgtgcagctgcaggcagctgatggtccacatgtggttgatgttgccttccaccgcggcttccagcgcctgcgccttggcgtggccggtcaccaggatcatcacttcttccgcgtccaacagcgtgcccacgccgacggtcagcgcatatttcggcaccaggctgacgtcgccgccgaagaagcgcgagttggcgatgcgggtgtcttcggtcagcgttttgatgcgggtgcgcgaagccagggacgaagccggctcgttgaacgcgatatggccgtcgatgcccacgccgcccataaacaggttaattttgccgtaagacttgatcttctcttcgtactggcggcactcggcgtcgacatccgcggcgttgccgttcagcaggttgatgttttcacgaggaatatcaacgtgatcaaagaagttgcggtacatgaaggtgtggtagctttccgggtgttcctgcggcaggccaacgtactcgtccatgttgaaagtcacaacatgcttaaagcttacttcacctgctttgtgcatcgcaatcagatgtttgtaggcttccagcggcgtgccgccggtaggcaggccgagtacaaacgggcgctctgcggttggcttgaatgcgttgatgcgttgaacgatatgacgcgcggcccatttgccgacttgtgcggtatctttcagtgggataagtctcatctaacacctcttgggataagtaaactaaagctatactgtacgggcctgcgggagtcctaagcgtaacccagctttatgattctcgcgtgaatcgtccgtccggttgattttttgaatgataaaataagttttgtgtgatggccagcaatctgggaggtaaagactactttttggtgatatttatcacaaaaagggaggttttaatttgcgatacaaaataaattttttacactcggcatgagtgatacgtgccatgcgttgtttctaaaaaggtagtgagagctccaaataaactactaatagggtccgtccgcggacaacatagggggaaaaggtgaacattcttagttatttgcaaaaggtgggacgggcgctgatggtgccggtcgccacgctgcccgccgccgccatcttgatgggcgtcgggtactggattgaccctgttggttggggcggcgacaacgcgctcgccgctttcttcattaaatccggctccgctatcatcgacaacatgtcggtgctgttcgctatcggcgtggcctacggcatgtccaaagacaaggacggtgccgccgcgttgaccggcttcgtcggcttcctggtgctgaccaccctctgttcgccggccgccgtgtcgatgattcagaagatcccgctggatcaggtgcctgccgcgttcggcaagatccagaaccagttcgtcggtattctggtgggcatcatttccgccgaagtgtacaaccgcttcagcggcgtcgagctgcctaaggcgctgtcgttcttcagcggccgccgcctggtgccgatcctcatctccttcctgatgatcctggtcgctttcattctgatgtacatctggccggtgatcttcaacggtctggtgaacttcggtgaacacatccagaaaatgggctcggtcggcgcgggcatctatgccttcttcaaccgcctgctgattccggttggcctgcaccacgcgctgaactcggtgttctggttcgacgtggccggcatcaacgatattcctaacttcctcggtggccagcagtcgatcgaagccggtaaagcggttgtcggcatcaccggccgttatcaggcgggcttcttcccgattatgatgttcggtctgccgggtgcggcgctggccatttatcattgcgcgcgtcctgagaacaaagccaaagtggcgggcatcatgctggcggccgcgttcgccgccttctttaccggtatcaccgaaccgctggaattctccttcatgttcgtggcgccggtgctgtatgtgatccacgccgtgctgaccggtatctcggtgttcatcgccgccagcatgcactggatcgccggtttcggcttcagcgccggcctggtcgatatggtgttgtcgtcccgcaacccgctggcgacccactggtacatgctgatcccgcaaggcctggtgttcttcgtcatctactacgtggtgttccgcttcactatcaacaagttcaacctgatgaccccgggccgcgagctggcggttgccggtgacgaaaccgacggctacgacgtcaacgtcgacagcaacgccggtaaagacgagaacgaaaccaccacgctggcccgtcgctacgtcggcgcgatcggcggctccgacaacctgaccggcatcgatgcctgcatcacccgcctgcgcctgaacgtgaaagactccgcgctggtgaacgacgcgttggcgaaacgcctcggcgcatcgggcgttatccgcctgaacaagcagagcgtgcaagtgatcgtcggcacccgtgccgaacttatcgccagcgcgatgcgcaacgtgatcgcggccggcccggtagcggcagcggcggctccggcggcggcccctgctgcagaagccaaaccgcaggcggtgccgaacgcaccgaaagccgcgtttgaaacgctggtggcgccggtaaccggtgaagtggtggcgctcgatcaggtgccggacgaagccttcgccagcaaggcggtaggcgacggcctggcgattcgcccgaccgacaacatcgtggtgtcgccggctgacggcaccgtggtgaaaatcttcaataccaaccacgccttctgcctggaaaccgacaagggcgctgagatcgtggtgcacatggggatcgacaccgtcgcgctggaaggccagggcttcaaacgcctggtggaggaaggcgcggaagtgaaagccggtcaaccgattctggaactggatctggattacctgaacgccaatgcgcgttcgatgataagcccggtggtagtcagcaattctgacgactatgccggcctggcggcgctggccagcggctcggtggtcgccggtcagaccaagctgtacgagatccagaaataaggctgtttttacctgagtagtacccggggccggtcacgcatcatggcggagtttgccccgacttggcgggaagagagcgatctcttcccgctttttttatcccatttcgctccacggcggtgcgctgcgcgccgatggtgcaatatgccgcatttttcgtgaaacaaacggttgtttccagacgtggcttgttggatcataggcggttatgtgtagcgctttgcattgaggaacagtgaaatgagtgaggctgaagcccgcccaaccaattttatccgtcagatcgtcgatgaagatctggcgtcggggaaacacacgtcggtacatacccgtttcccgccggagcctaacggttatctgcatatcggccacgccaagtccatctgcctgaacttcggcatcgccaaggactatcagggccagtgcaacctgcgtttcgatgacaccaacccggtgaaagaagacatcgagttcgtggagtcaatcaagcacgacgtggagtggctgggctttgagtggagcggcaacgttcattactcctcagactatttcgatcagctgcaccagtatgcggttgagctgattaccaaggggctggcctacgtcgatgagctgtcgccggagcagatccgtgaatatcgcggcaccctgacctcgccgggcaaagacagcccgtaccgcgaccgcagcgtggaagagaacctggcgctgttcgagaagatgcgcaacggcgagttcgccgaaggcgccgcctgcctgcgcgccaagatcgatatggcttcgccgtttatcgtgatgcgcgatccggtgctgtaccgcatcaagtttgccgaacaccaccagaccggcaacaaatggtgcatctacccgatgtatgatttcacccactgcatttccgatgcgctggaagggatcacccattcgctgtgcaccctggagttccaggataaccgccgtctgtatgactgggtgctggataacatcaccattccttgccacccgcggcagtacgaattttcgcgtctgaacctcgaatacgccatcatgtcgaagcgcaagctgcaccaactggtggccgagaagatcgtcgaaggttgggatgacccgcgcatgccgaccgtctccggtctgcgccgccgcggttataccgccgcctcgattcgcgagttctgcctgcgcatcggcgtgaccaagcaagacaacaacgtcgagatggtggcgctggaatcctgcattcgcgacgatctgaacgagaacgccccgcgcgccatggcggtgctggatccggtgaaaatcgtcatcgagaacatgggcgacgcggtggaaatggtcaccatgcctaaccacccgaacaagccggaaatgggcagccgcgatgtgccgttcagccgcgagatctatatcgatcgcgccgacttccgcgaagaagccaacaagcagtacaagcgtctggtgctgggtaaggaagtgcgtctgcgcaatgcgtacgtgatcaaggccgagcgcgtcgagaaggacgaagcgggcgagatcaccaccatcttctgcagctacgatgcggaaacgctgagcaaagatcctgccgacggccgcaaggtgaagggcgtgatccactgggtgtccgcggcgcacgcgctgccggcggaaattcgcctgtacgatcgcctgttcagcgtgcctaacccgggcgcggcggaggatttcctctccaccatcaacccggaatcgctggtcatcaagcacggtttcgtcgagccgagtctggcggccgcccagccggagaaggcctaccagttcgagcgtgaaggctacttctgtgccgacaatcgttactcgtcggccgagcatctggtgtttaaccgcaccgttggtctgcgtgacacctgggcgaaaatcgaaggctaatcttattcgccttggaaattaatgaatcagcgcggcttaggccgcgctttttttatgtctgccatcgagcaaatcatctattcctgcagcgttattccgggctgtgcttaattaaccgcggtgcgttaatcaataagttttttgatattggacttaatagtcttaatttttacttatatattcgtgatgcgaattaatttcatttggagagcgctctcaatttttattgtctgaatgacggatttggtcaggctgaaaccattaatcgtctcttgttgacctcgtatctcaatttattctgatttaattgaattttttattcgacaccttccatgaacaccggcgtaacaaaatctcactgatatgtgctccttgtcatattttgacaaatctcccgcatttttcatttgataattcgcgtcgcgaaaaatagtctgtctgtagcaattagtgctgtgggaataacatctcgtcggcaattttttttacccgttcgggttttttattggcagtcgtgcagggcagtggtgaacacaggcggctgcaacttttaagttaagtcaaagaggaatttcaatatgggtacgcacggtgctcagcgtaaaacgctggcgctcgcagtcgcgggcgcgctgttgggaacagggtttgccatggcgcctgaggcgaaagccgcagggtttatcgatgattccacgctgaccggcggcatctattactggcaacgtgagcgcgaccgtaaagatctcaatccggacagcaaggattacaaccaatacaccaccaacctgtcgcactctaccgccaacctgagcctggatttcgcttcgggttatgcctgggacatgttcggtctggacgtcggtgcctttaccgccatcgagctggcggaatccagcgccagcggccacccgaacgagatcgcgttctcctcaaaaaaccgtacctacgacgaagactattccggtgacaaaggcggcgtcagcctgtacaaagccgccgccaagttcaaatatggcccggtctgggcacgcgccggctatattcagccgagcggccaaaccctgctggcgccgcactggagctttatgccgggcacctatcagggcgccgaggccggcgccaagttcgactacggcgatgccggcgcgttgagcttctcctacatgtgggccgacaaatacaaggcgccatggcatatcgaggtggacgacttccgccagaacgataagaaaacccgcgtctcctacctgcactcgctgggcgccaagtacgatttcaaaaacgatctggtgctggaagccgccttcggccaggcccagggttacgtgaatcagtacttcaccaaggcgtcttacaaattcgatgtgttgggcaacgcgctgaccaccagttaccagttctacggtgcggaagatcgcatcagcgacaagaacgatccgaacagcatctacgacgggctggcctggctgcaggcgctgaccttcggttacaccaccggccagttcaactggcgtctggaaggcaccatggtcaaggcggaaggcaaccagggcttcttcctgcagcgcatgaccccgacctacgcctcgtccaacggccgcctggacgtgtggtgggataaccgctccgactttaacgccaacggcgagaaagcggtgtacgccggcgtgatgtatgacctcagcaactggaacctgccgggcatggcggtcggcggctcctacgtttacgcctgggacgccaagccgagcaccaacccgatctacgatcagagccagcgcctgaaagagagcgcctggagcctggacgcgatgtacaccatccaggaagggcgcgccaagggcacgctgatcaagctgcactacacccagtatgacaaccacaccaacatcccgagctggggcggcggttacggcaacatcttccaggacgagaaagacgtcaagttcatggtcatcgcgccattcaccatcttctgatgcgttccccggcctcgtcgccgggggcagttaagggaattcaacgatgaaaaaaatcatgctgatgttggcggccgccgcggccttgagcgcctgcgcgcaacccgccgcgccgccggaagacgccaaattgaagcaggcttacagcgcctgcatcaacaccgccgaaggttcgccggagcgtctgcagccctgcaaggcggtgttgaacgtgctgaaacaagagaaacagcaccagcagttcgccgcgcaggaaacggtgcgggtgatggattatcagaactgcattatggcggtgcacagcggtaacggtcaggcttacgacgccaagtgcggcaagctgtggcaagaaattcgcgataacaataattaagaaggacgagaagatgaacgcattcaaactgagcgcactggccgccttgacggcaacgatgggattcctgggcggcatgggtaatgccatggccgatcaacagctggtggatcagctgagccagctgaagctgaacgtgaaaatgctggataaccgcgccggcgaaaacggcgtggattgcgcggcgctgggcgccgactgggcctcatgcaaccgggtgttgttcaccctcagcaacgacgggcaggcgatcgacggcaaagactgggtcatctatttccacagcccgcgccagaccctgcgggtggataacgatcagttcaagatcgcgcatctgaccggcgatctgtacaagctggagccgaccgccaaattcagcggtttcccggccggtaaggcggtggaaatcccggtggtcgccgaatactggcagctgttcagaaacgacttcctgccgcgctggtatgccacctccggcgacgccaagccgaaaatgctggcgaataccgacaccgaaaacctggaccagttcgtagcgccgttcaccggcgatcagtggaagcgcaccaaggacgacaaaaacattctgatgacgccggcttcgcgctttgtcagcaatgccgatctgcagacgttgcccgccggcgcgctgcgcggccagatcgtgccgacaccgatgcaggtgaagatccacgcacaggacgccgacctgcgcaaaggggtatcgccggatctgagcacgctggtcaagccggcggcggacgtcgtcaaccagcgtttcgcgctgctgggcgtgccggttcaggccaacggttacccgatcaagaccgacatccagccggacaagtttaaaggcgcgatggcggtgtcgggtgcctatgagctgaaaatcggtaagaaagaggcgcgggtgatcggcttcgatcaggccggggtgttctacgggttgcagtcgatcctgtcgttagtgccgagcgacggcagcggcaagatcgccacgctggacgccagcgatgcgccgcgcttccagtatcgcggcattttccttgacgtggcgcgcaacttccataagaaggacgcggtgttgcgtctgctggatcagatggcggcttacaagctcaataaattccacttccacctgagcgatgacgaaggctggcgcatcgagatccccggtttgccggagctgacggaggtcggcggccagcgctgccacgatctgagcgaaaccacctgcttgctgccgcagtacggccaggggccggacgtctacggcggcttcttcagccgtcaggactatatcgacatcatcaaatacgcccaggcgcgccagattgaggtgatcccggagatcgacatgccggcgcacgcccgcgcggcggtggtctctatggaagcgcgctacaagaaactgcatgccgccggcaaagagcaggaggccaacgagttccgcctggtggatccgaccgatacctccaataccacctcggtgcagttctttaaccgccagagctacctgaacccgtgcctggattcctcccagcgctttgtcgacaaggtgattggcgagattgcccagatgcataaagaagccgggcagccgatcaaaacctggcacttcggcggcgatgaggcgaaaaacatccgcctgggcgccggctataccgacaaggcgaaaccggagccgggtaaaggcatcatcgaccagagcaacgaagacaagccgtgggccaagtcgcaggtttgccagacgatgatcaaagaaggcaaggtggccgacatggaacacctgccgagctacttcggccaggaggtcagcaagctggtgaaggcgcacggcatcgacagaatgcaggcctggcaagacggcttgaaagacgccgagaacgcaaaggcgttcgccacctcgcgcgtgggcgtcaacttctgggatacgttgtattggggcggtttcgatagcgtcaacgactgggccaacaaagggtatgaagtggtggtctccaacccggactacgtctacatggacttcccttacgaggtgaacccggacgagcgtggttactactggggcacccgcttcagcgacgagcgcaaggtgttcagcttcgcgccggacaacatgccgcagaacgcggaaacctcggtcgaccgcgacggcaaccactttaacgccaaaagcgacaagccgtggccgggcgcctacggtctgtccgctcagctgtggagcgaaacccagcgcaccgatccgcagatggaatacatgatcttcccgcgcgcgctgtcggtggcggaacgcgcctggcaccgagccggttgggagcaggactatcgcgccggccgtgaatacaaaggcggggaaacccactttgtcgacaccaaggcgctggagaaagactggttgcgcttcgccaatatcctgggccaacgagaactggccaagctggacaaaggcggcgtcgcttaccgtctgccggtgccgggcgcgcgcgtggcgggcggcaagctggaagcgaatatcgcgctgccgggattgggcatcgagtactccaccgacggcggcaagcagtggcagcgttatgacgccaaggccaagccggcggtatcgggtgaggtgcaggtgcgttcggtcagtccggacggtaaacgttacagccgcgccgagaaggtctaagcccggcacatcggcctgtcgtcatggcggcgggccgcttaacgaagcgggaatgcgttcgcccccgcgcgtgccggcgtggggcggatgttgaagtgagagcagtacgtggagtcgcagtgccgctgcaattgtagtatttcatgacatgatctttccccggcttgcccggggatttttttgcccgttgtacggcgggcataaaaaaaccgcctcaatgtgaggcggtttctcatagccggtcaggcttatttcttgtcgtgcagcgattcgtcttcgcggcagtcaccggtttcacagtggccgtacaggtacagactgtggttggtaagcttgatgccgtgctgcttggcgatatcacgctggcgcacttcgatggattcgtcgctgaattcgatcactttgccgcagtccaggcaaatcaggtgatcgtggtgatgctgttgggtcagctcgaacacggacttgccgccttcgaagttgtgacgtgtcacaatgcccgcatcgtcaaactggttcagtacgcgataaaccgttgccaggccgatctcttcgcccatatcaatcagttttttgtacaaatcttccgcactgacgtgatggcattccggattttgcagtacttccaggattttgagtcgcggaagcgtgacttttaagccggccttcttcaatgcgatgttgttgtcggtcatgcgaattcagtcctgttactatgctaatcaagttgaggcgtactcgcctgtggcatcggtcggcacaaagagttaatgcgtctcattatagaaccggttgtactaaatggaaaccgccggttgttaacaaagatataattgcactattgcatgttttgcatgcaacgccttgatggatgggataaaccgatatctcagtctaccgtgacggggtgggaagttacaaatctgtagcttctatcgcagcaatccctgttgccgatgacggccctgtcggcacactatgcactttacagggcctttgttcaacctttcgccagtcccggcgtttagccgacgatatcggccaggctcagctcttcgacaatctgtttgacccaggcgtcgacgcgctcattggtcagctccggctgacggtcttcgtcgatcgccagaccgatgaagtggttgtcgtccgccaggcctttggaagcttcgaagtggtagcctttggtcggccagtggcccacgatggccgcgccgcgcggttcgatgatgtcgcggatggtgcccatcgcgtcacagaagtattccgcgtagtcttcctggtcgccgcagccgaacagcgccaccagtttgccgttgaaatcgacttcttccagcgtcgggaagaaatcgtcccagtcacactgcgcttcaccgtagtaccaggtcgggatacccagcagcaggatatcgaacccttccaggtcttctttgctgcttttggcgatgtcgtgcacttcagagacgtcgtcgccaaactgtttctggagaattttctggatcattttggcaatgttttcggtattgccagtgtcgctgccaaagaaaatgcctacagtagccatatcgcgtataacctttaaattcaattaattgcattactcggcgccggcactgccgccgattaaaatgatgccatggcaagagcctttcgccacggtggcgggcgccgacaggcgcagtctcttaccggtaaatgcgtatcatgccagaaagtggcgccggggttttatcgcatttatgcgatgccgaaggatgaagaaaagcgtggtcgatccggcgttgtccttaacgccgcgccgcgcgtgcggccgaagagatcaatgttccggctgttcttccgccagttgcgccaacagcatctgctcgatgagttcgctgcggctgatgttgcgctgttccgccagtttgttcagggcgtccaccgcatccgcgttgattttcagctctacgcgccgcaatccgcgcactttatcgcgccgtaactgattgcgcttattgattctaagctgttcatcgcgggaaagcgggttggttttcgggcgccccggacggcgttcatctgcgaacagatccagcgtcgtgcgatccgtttgttcttttgccataggtagcggtactgcaagggagtttgcatcaaaaagcgctcgcacgcttccggaggcatcggttaacacacttcgggccaataaaccctaacccaaatttacccccgaaccggcgttcgcgaacgcgctggcgcggcggcaaaattatagcgcgccatattaccccagcagatggagcggcgacaatgcctaactgcgggctaaacgcgctaagccgttatctttagcgcgttttttcgccaggtgagcgcgtttttcaggcttcgccgaggaaacggtggatggcgcgcagcaccgcttccggtttttcggcgtgcacccaatggccggtgccggcgacgacgtgcgcgcgtgcctgcgggaattggcgggcgatgtctgcacggtagctgtcctgcacgtacggcgacaggccgccgcgaatgaacagggtcgggtgtggccaggccgggacttcctgccagccggtgatgtcttcgtagcgttcgatcagcaccggcaggttgaagcgccattcaccgttatggaaggacttcagcaggaactggatcacgccttcttcctgcaggtagtcgcgcatcaactgggcggccgcctggcgctgggtaatgccggcggcgctgacggccttcagcgcggcgaagatctcgtcatggcgtcgggtctggtaatccaccggcgcgacgtcgatgacgatcagcttggcgatgcgctcgggcgcgatggcggtcagcgccatcgccgctttgccgcccatcgagtggccgatgacgatcgctttctccagctgcagttcgtcgagcagcgccagcagatcttgcgccatggcggggtagttcatgtcgtcggcgcgcggggagaggccgtggttgcgcagatcgaccttgatcacactgtgctgtttatgcagatcgcgcgccagcacgcccaggttgtcgagattgccgaacagcccgtggatcagcagcaccggcagcgcgtctgactcggcggccagcagttgataatgtaatttcatggcgaagttcatacagagagagattcagattagggtatcatgattgaatcgcacgatgaatcatgcggaattttcgcggcgcgggcttggcagtgccggctataggtattagtctgcatttgccgtccggaggcacattgttgtgttcgccccagcgcttttaaccttataatcccatggcttgaatgcaggatctggcttcaggttctaagtagaaaaaacagtattggataaagatgaaaactattgaagtcgacgaagagctttaccgttatattgccagccacacgcaacacatcggtgaaagcgcgtccgatattttacgccgcatgttgaaattcaccgccgggcagccggcgcgcgcgttgcctgccgccagtgcgtcgcagtccgtcgagctggaaaaagcggcgccggttcagcgcccgcgcgatcgcgtacgcgccgtgcgtgaactgctgctgtcggatgaatacgccgagcagaacaaagcggtcaaccgtttcatgctggtgctgtccacgctgtacaccctcgatgccgccggttttgccgccgccaccgaggcgttgaccggccgtacccgcacctatttcgccggcgatcagcagaccctgctggccaacggcacgcataccaagccgaagcatgtgcctggcaccccttactgggtgatcaccaataccaataccggccgcaagcgcagcatgatcgaacacatcatgcaggcgatgcagttcccggcggaactgatcgagaaagtttgcggtaccgtctaatttagcgaacagcccgtcatgatggccgtgcgcgacgtatttgcccggtcaccgacagggatgagggagatatgtcgatggcgaataatccacgtgccgggcagcccgcccgccaaagcgatctgatcaacgtagcccagctgacgtcgcagtactatgtgctgcaaccggaagccggcaatgccgcacatgcggtgaagtttggcacctccggccaccgcggcagcgcgcagcgccacagcttcaacgaagcgcacatcctcgccatcgctcaggcgatcgccgaagttcgtcatcagcagggcaccaccggcccgtgctacgtgggtaaagacacccatgcgctgtccgaaccggcctttatttccgtgctggaagtgctgaccgccaacggcgtcgatgtgatcgtgcaggaaaacaacggcttcacgccaacgccggcggtatcgcacgccattctgtgccacaaccgccgcggcggcgcgcaggccgacggcatcgtcattacgccgtcccacaacccgccggaagacggcggcatcaagtacaacccgccgaacggcggtccggctgacaccaacctgacgtcggtgatcgaaaagcgcgccaacgaactgctggcgcagcagctgaaaggcgttcagcgccagtcgctggacaaagcctggaacagcggccacctgcacgccaaagatctggtgcagccttatgtcgaaggcctggttgacgtggtcgacatgccggccattcaacgcgccggcctgaaactgggcgtggatccgctcggcggctccggcatcgcctattggcagcgcgtggcggaacactacaagctggatctgacgctggtgaacgactccatcgatcagaccttccgctttatgcacctggatcacgacggtatcatccgcatggactgctcgtccgagtcggcgatggccggcctgctggcactgcgcgacaaattcgatctggcgttcgccaacgatccggattacgaccgtcacggcatcgtcacgccgaagggcctgatgaacccgaaccactatctggcggtagccatcaactacctgttccggcatcgcccgcagtggggcgccgatgtggcggtaggtaaaacgctggtgtccagcgcgatgatcgatcgcgtggtggctgacctgggccgcaagctggtggaagtgccggttggtttcaaatggttcgtggacggcctgttcgacggcagcctgggcttcggcggcgaagagagtgccggggcctcgttcctgcgcttcaacggccagccttggtcgaccgacaaagacggcatcatcatgtgcctgctggcggctgaaatcaccgcggtaaccggtgaaaatccgcagcatcactatgacgatctggccaagcgcttcggtgcgccaagctacaaccgcatccaggcgccggcaacccatgcgcagaaagcggcgctgtccaagctgtcgccggagatggtcaaggccagtacgctgggcggggacccgatcaccgcgcgtctgaccgcagcgccgggcaacggcgcgtcgatcggcggcctgaaagtgatgaccgacaacggttggttcgcggcccgtccttccggtaccgaagaggcatacaagatctactgcgagagcttcctcggggcggaacaccgcgagaaaatcgagcacgaagcggttgagatcgtcagcgaagtgctggcttccgccaaataatcgttgttctcgtctgataaaaagcgctgtttttacagcgctttttttatgcccgtaatttagatatatctttttcacggcacgcgcttgcgcatttagatatatcgatctagattagcgttatcgacgctgtttagatatatctaaacaacctcgtattgatgttcactgttaaagcgaggtatcaccctatgtttcatcgattaggtttacaccggcatcatcaccatcatgaatgtgaagaggggcgccgtcatcgcggtggacgccatcacttcggcggcgacggcgaagagcatggccgtggcgggcgcggcggccgcggcgggcgtcatcgtctgttcgaacacggcgatctgcgtctggtgttgctggcgctggtggcgcgcaagcccagccacgggtacgagttgatcaaagcaatagaagaagcttcttccggcctgtatgtgccgagcccgggggtgatttaccccacgctgacgctgctggaagagcaggattttctcgaaccgctcaccaccggcaacggccgcaaaagctaccgcatcacctcggcgggcgagggcgagctgcaaaagcatcaacaggtggttgaggtcattctggcgcgtctggcgggcgccggccgcgagcatcatcggcacggcaacctggcggaaggcatttacgacgccatgaaccgtctgcgcagtctgctgcgcggcaacgtgatgcgcgccgatcttacgccgcagcaggtggagcgcatcaacgccgcactgttgaccgccgtggcggcgatcgaaagcgaaatgcacattcaacccacgcagcaggaggagaactgatgcccggccaccgttttaacattaccgttgaagccctgagcgaccgccagggcaaccccgtcgagaaggcaccgctgagttttgaggtgaccaaccatgacgatattctcgagatcgtcgagcgcattcgggcgcgtgacgatctgaacttcggccctgagcagagcgcggccttcgccgtggggttgaaactgttctccgaagtgatgatcgaaaaccgcaaacacccggtgttcgctccgctgcgcgaggcgttcaaggaatttatggtcggattgaagaagggcccggtggcgtaacggcgcggcaaaccgcgcccgtcggggttaaggcatgaaacggtagccgacgccggtttcggtcagcaggtgtttgggccgggccggatcggcttccagcttctgccgcaaatggcccatgtagatgcgtaggtagtggctgtgttccacgtagttcggcccccagacgtggctcaacagctggcgttgggtgatcaccttgccggcgttggccagcagctccgccaacaggcgaaactcgatcggcgtcagatgcagatcttcgtcattgcgcagcacccggcgattcaccagatcgacggtgatcgccgaaaagctcaccagcgggctttcctgttggttagctgagtggcggcgcagcgcgacccgcacccgcgccagcagctcaccgatgccgaacggcttgctgaggtagtcgtcggcgccggcgtccagcgcggcgattttgtcctcttcggcgttgcgcgccgacagcacgatcaccggaatggcgctccactgccgcagatcgcggatgtagctcagcccgtcaccatccggcaagcccaaatcaaggatgatcagatccggtttgcgcgtgccggcctcaatcagcccacgttgcagggtttcactttcaaacacccgcaggccttcgctctccagcgcggtgcgcacgaagcggcggatctctttttcatcttcaacaatcagaatgttggttggcgttatgctcacgtttcccctgcgttgattacagatcgaaggcatcgccgtcgatctcgggcggtttttccagcggcagcacgaagcggaagctggcgccgccgttggcgccgttttccgcccagatgcggccatcatgcacttcaataatggcacggcaaatggctaaccccaagccgacgccggggatcgccgactctttattgccgcgtgaaaacttgtcgaaaatcagctgcagctgatcggcggggatgccggggccgttatcccagacctcgacttccagccactcgggcagcgtgcgggcgcgaatgccgatggtggcctcggcgccggcgtatttattggcgttttccaacaggttggtgaacacccgttccagcaggctgccgtcgcagttgaccaggatctgttccggcggcagttcgaccacgatcggatgctggctgagcagcggctccagcatgtgcagcgaggcgccgacgatctcttccagcgactgccactctttacgcaggctgaaaccgccggactggatgcgcgccatatccagcaggttgttcaccagccgggtggtgctcagcacctgctggcggatctggctggcctgggtggcgtgattggagccttcggccgccaggtccagcgtgagaatttccgcctggccgaacagcacggtcagcggggtgcgcagatcgtgcgacagcgccgccagcagcgagttgcgcagctgttcgcgttcggcgtccagcttggcttcttcggcgctgcgcgccaggtgcagccgttccagcgcgctggcgatcagcactgcgaaggtttgcagcagccgctgttgttccggcaccatcagctggcgcaggttgttgggctcgatcgccaacaggccgaaggtctgtttgggggtattgagcggcagcagctggtaaggcacgccgggcagggtgtcggtgccggcgccggccggcaagcctttatcgaaactccagcgcgcgatggcttcgtctaccgacagcagaccgccttcctcgccgatcatttgctgcagccggccgtcttcctgcggcagcagcagcacggttttcgcctggaagctgctggagaggaaatgacggctggtgttggcgatgtcggccacggtcagcgcgcggctcagcccgcgtgacatttcgtacagatggcgcgcccgctgctcgcggtagcgcgccacccgggcctgataacgcaccccggcggtcaggttgccgatgatgatgccgacggcgagcatcacgccgaaggtcagcagatactgcatatcgctgacggcgaacgaccattcgggctggacgaagaacagatcgaaactggcgacgttgatcaccgccgccagcaccgatggccagcggccgaagaacagcgcgacgatcgccacgccgagcaggtagaccatcaccaggttggcctgatcgaagcccggcagcagccactgcgagagcagggtgatcagtgcgcacagcgccaccgccaccgcacagccgcgcagctgcatgcgccatttctcattgaagctgcggccgtcgtgctccttgcccggcggcggcggtgcggcgtcgctgtccagcgcgacgatcaccagatcgagatccgggcccagtctgccgaggcgatcggcgaagctgccgcgcagcttccagcgctgctcgctgcggcggccgatgatgattttgccgaggttatgttcgcgggcgtagcgcagcaccgcgcgctcttcggacggatcggccagggtggcggtttcggcgcccagctcctgcgccagccgcagcgcacgcagaatggcgcggcgttggttttccggcagccggtgcagcttgggggtttccacatagactgcatgccagtggcagccgagccgcgccgccaggcgggcggcgatgcgcaccagcttttcgttgccgctgttgtggccgacgcacagcagaatgctgtcgcgggtgtgccacactttctcgcgcccctgggtgtcgcgaaactcgcgcatctggtcatcgacccgatcggcggtgcggcgcagcgctaactcgcgcagggcgatcaggttgcctttacggaaaaaatgctcgatggcgcgctcggcctggccgggaatatacactttgccttcgtgcagccgccggcgcagatcgtccggcggcagatcgaccagcaccacttcgctggcctcgtcaaacacgtggtcgggcaccgtttcgcgcacccgcacgccggtcacgccgcccaccacgtcgttcagactttccaaatgctgcacgttgacggtagtcagcacgtcgatgccggcgtccagcagctcttccacatcctgccagcgtttggggtggcgcgaaccgtgagcgttgctgtgcgccagttcatccatcaggatcagcgccggatggcgcgccagcgcggcgtcgagatcgaattcatgcaccagccggccgcgatgctggatgcgcttttgcggcaacagcgccaggccgtcgagcagggcggcggtctcgctgcggccgtgggtttccaccacgccgaccagcacgtccagcccctgagcgcgcaaacgctgggcctcctgcagcatggcataggttttgcccacgccggcgcaggcgccgaagaataccttcaaccggccgcgcggtttttcattggccagcgccagcaggctatcgggatcgggacgctgctgttcttcttcgaccatgacaattccttgtgttaccaagcaaaaaggggttcggcatgccgaaccctatcactatgctgaatacggcgcgctacttcaacgcatccagcgccaggttcagcttcagcacgttgaccaccgattcccccatgaagttgggcgtggcccgatcggtgttgtcttcgatcagtttggcgacctgttccggcggcagatgacgcgccgccgcgacccgcgccagctgataccgcgccgcggcgatcgaaatctgcggatccagcccgctgccggaggcggtcagcagatccaccgggatcgggccgctcatggccggattggcctggcgcagctgcgccgcgcgttcggcgatagccttatccagcgccgggttggtggccgccaggttgctgccggcggaggcctgtggattataagccgaatcgccggtcgccgacgggcggccccagaaatagtcggcgcgcgtgaagttctggccgatcagcgcagagccgaccgccttgtcgccctggtacagcagcgaaccgttggccgcgcccgaaaacagcagctgcgccagcccggtggtcagcagcggataggcgatgccggtgatcagagtcagcaggatcaacatcaccagcgcaggtcgtaaatacgtcatgttcatttccctcaatggttaaccggcgacgtgcagcgcgaccaggatcaggtcgatcagtttgatgccgatgaacggcaccagcagaccgccgaccccatacagccacaggttgcggcgcagcagagccgcggcgctcatcggtttgtagctcacccctttcagcgccagcgggatcagaaacacgatcaccagggcgttgaagatcaccgccgacatgatggcggaggcgggggagtgcaggtgcatcacgttcagcgcgttcagctgcggataggtggccgcgaacgccgccggaatgatggcgaagtacttggccacgtcgttggcgatgctgaaggtggtcagcgagccacgcgtcatcagcatctgtttgccgatatgcaccacttcgatcagcttggtcgggttggaatccagatcgaccatgttgcccgcctctttggcggcctgggtgccggagttcatcgccaccgccacatcggcctgcgccagcgccggggcgtcgttggtgccgtcgccggtcatcgctaccagacggccttccgcctgatactggcggatcagcgccagcttggcttccggcgtggcttccgacaggaagtcgtccaccccggcttcggcggcgatcgccgccgcagtcagcgggttatcgccggtgatcatcaccgttttgatgcccatcttgcgcagctcattgaagcgttccttaatgccgcccttgacgatatccttcagcgctaccacgcccagtacccgggcgccttccgccaccaccagcggtgtaccgccggtgcgcgccacgctttccaccagatcgtccaccgcccgcgggaagtgcccctgattggattcgacgtgacggcgaatggcatccactgcgcctttgcggatcatgcgctcctgcacgttgacgccgctcatgcgggtctgggcggagaagggcacgaaggtggcgttcagcgcctgcagatcgcgctcgcgcaggttgaatcgttgtttggccaacaccacgatgctgcggccttccggcgtttcgtccgccagcgaggccagctgcgcggcatccgccagctcttgctctttcacgcccggcgccggcaggaactccgaagcctggcggttgcccagcgtgatggtgccggttttatccagcagcagcacgtccacgtcgccggcggcttccaccgcgcggccgctggtggcgatcacgttggcgccgagcatgcggctcatcccggccacgccgatggcggacagcaggccaccgatggtggtggggatcaggcaaaccagcagcgcgaccagcacggtgatggtgaccacgctgccgctgccggccgcctcgacgctgtattgcgagaacgggaacagggtggcggtggccaacacgaacacgatggtcagcgccaccagcaggatggtcagcgcgatctcgttcggcgttttgcggcgcttggcgccttccaccatggcgatcatgcgatcgaggaaggtttcccccgggttgacgctgcactgcaccaccagccagtcggacagcacgcgggtgccgccggtgaccgaggagaagtcgccgccggactcgcggatcaccggcgcggattcgccggtgatggcgctttcatccaccgaagcgccgccctccagcacttcgccgtcgcacgggatggtatcgccggcttccaccagcacgatatcgcctttgcgcaggctctcggcggccactttctccgtggcgccgtcgcggcgcgggccggccagttttttcgcccagctggttttcttggtgcccttcaggctttccgcctgggccttgctgcggccttcggccagcgcctcggcgaagttggcgaacagcacggtgaaccacagccacagggagacgctgccggtaaaggcggcggcgccgtcggtttggccggtgagcatcgccagccagatagcggtggtcagcaggctgccgatatacaccacgaacatcaccgggttgcgccattgaacgcgaggatccatttttttcaccgcatcgatcagcgcggtgcgcaccagagccggttcaaacagcgcgcgttgtttgcgagtcatctcttattctctctctgtgacgtcggttagtttgccagccaaagctgcaaatgctcggccaccgggcccagcgccagcgccggcacgaaggtcagcgcgcccaccagcagcacggtgccgatcagcaggccgataaacagcggcccataggttggcagggtgccgttgcccgccggctggcgtggcttggcgctcagcgaaccggcgatcgccagcaccggcaggatcactccgaagcggccgacgaacatggcgaaggccagcagcaggttgtagaacggcgtattgacgctcaacccggcgaaggcgctgccgttgttgttggcggcggaggacagggcatacagcacttcgctgaagccgtgggcgcccggattgaggatgccggcgcggcccgcgtcggtgccgatcgccagcgcgctgcccagcaacaccagcgtcggcgtgaccaggatcgccagcgcggtcatcttcatgtcgtaaacgtcgatcttcttgcccagatattccggggtgcggccgatcatcagaccggcgataaacaccgtcagcagtacgaacagcagcatgccgtacaggccggagccgacgccgccgaacaccacttcaccgatctgcatcagccacatcggcaccatgccgcccagcgcggtgaaggagtcgtgcatggcgttgaccgccccgcaggacgcggcggtggtcaccaccgagaacaggctggtggcgagaatgccgaagcgcgactctttgccttccatattgatgttgctgtcggcgcccagcgcgctcaggtgcgggttgcccgccagctcggcaaccatcaccaccaccaccgccaccacgaagatcagcgccatcgcccagatcagcgcgtggccctgacggttttctccggccagctggccgaaggagaagcacagcgcgcaggggatcaggaagatggccagcatctgcacgaagttggtcagcacggtcgggttttcgaacgggtgcgccgagttggcgccgaagaaccccccgccgttggtgccgagcatcttgatcgcttcctgcgaagcgaccggccccatcggcagcgtctgctgcgcgccttcgagcgtggtgacgtgcaggtaaggcaggaagttttgcagcgtgccctggctgacgaagaacagggcgatcagcagcgcgatcggcagcagcacatacagcgtgatgcggaacagatcgacccaggcgttgccgacggtcttgccggcgcggcgggtaaaggcgcggatcagcgcaaaggccacggcgatgccggtggaggcggaaacgaagttctgcaccgccagcccggccatctggctgaaatagctgagggcgctttcaccgctgtaggcttgccagttggtgttggtgacgaagctgacggcggtgttgagcgccagatcccaggagaggccagggaagccttgcgggttgagcggcagcgagccctgcgccatcagcagggcgaacagcagcgccaggccgagcaggttaaacgccaggatcgccagcgcgtactgccaccagttcatctcggtggggcggatgccgcaggcgcgccagacgccggcttccactgcgcgcagcgcaggcagcggctcaccttcgatcaggcgcgccataaaaccgcccagcggccgggccagcagcagaagcaccaacaggaaactggcgatcagtaaaaaggctgaagccgccatcagaaatcctccgcgttaaacagggcgtagaccagataggccaacagcagcagaaccaacagcgcaccaccaataacgctgaaactcacgggacacctccagaggtgttgtttttgatagaggcagtgtagggagcggggtagaaagaagatgaaaaaatcgcgcgggcgggtgtaaaaaaagtataaaaatggctgaaatttcagcggaaattggccgtttcaggcaacctgcttgcggcgagattgcgcctgatgtgtgaataagccggggctggggcgtgggatgaagaaccgaataataaccacaatgtaacccatgtttagttaaaaattaacttgattgtaacaaaattacgaatcgctgcggtgattagcgattttttgtgcgatttagtggtcggatgagtagtaaactttcatcaagtgcgctaaaattttgtccagttaccaaattaccgattgttcatttgatacgccgacgccgttttccctgacaaatcaacggcaggcgtttttaaggaggttcgcatgtctacgacctatcacgcttattcactgcatcggattctcctgcgccgcagcgcagtggttatcgcgggcattttggccctgccggtgatgctgttccgcagcgatcgcgggcgtttttacagctacctgcaccgcgtctggtcaaaaaccagcgataagccggtctggctgcagcaggcggaactggcgtcctgcgatttctactgagtcgctgccgattcacgaacaaccctcgccctgcggcgggggtttttttatgccccaagcccgctgccgtcaagcgcaaggtcgtatttggcaagccattcttctacactttccccatcgaccaacaccacgagagaacggtatgagtgacaagatccctatcggcatcagcgcctgtttactgggcgacgcggtgcgtttcgacggtggccacaagcggctggccttcgcggtggaacagttggcgccctatgtgcgctttgagcccgtatgcccggaaatggcgatcggcctgcccacgccgcgcccggcgctgcgcctggtgaaacaggcgcagccctggccggcgatgcgctacagcaacgacgccggcgtggatctgaccgaggagatgcgcagtttctccgcgcagcgcgtggccgcgttgcagcacctgtgcggttatatcgtctgcgccaagtcgccgagctgcggcctggagcgggtgcgggtctacagtgagaacggcaaggactcgcgtaaaaacggcgtcgggctgtttaccgccgaactgctgcgtcagatgccgtggctgccggtggaagaagacggacgattgcaggatgcggcattgcgggaaaacttcattgaacgggtgtacgcgctgtatgagttgaatatgctgtggcgccaggggctgacccgcggcgggctgatcgcgtttcacagccgctacaagctgtcgctgctggcgcattcgcagccggcgtaccgcgaactggggcgtttcgtcgccgacattcatcgctgggactcgctggaggccttcgccgtggaatatcgcagccgcctgatggcgctgttggcgcacaaggcgacgcgccgcaaccataccaacgtgctgatgcacgtgcaggggtacttccgccgccagctcagcgcggcgcagcgccaggagctggcgcacctgatcgaccgctaccggcagggcatgcagccgctgctggcgccgatcgccttgcttaagcattacatggcggaataccccgacagttatctggcggaacaacgctatttcgaaccttatccggaggcgctgcgtttgcgttacggccattgattgacaagggaattttatgaccacgcatctggtctggttgcgtaacgatctgcgtatcaccgacaacaaagcgttgcatgctgcctgcagcgatcccaaagcccgggtgctggcggtgtttatcgccaccccgcagcagtggcggcagcatgagatggcgccgcggcaggcggcgctgatccacgccagcctgcgggcggtacagcaggcgctggcgcaaaagggcattgcgctgcattgccatgcctgttcggactttgctgcatcgatcgactggctggcggactattgccggcgagagcaggtggacgcgctgttttacaatcgccagtacgaactgaatgaacggcgccgcgatgcgcggctggagcagcagttgaatggacgggtaacgtgccacggttttgatgacagcctgctgttgccgccgggcagcgtgctaaccggcggcggcgagatgtacaaggtttatacgccgtttcgcaacgcctttattcagcgcctgactgagtccgacgtgagctgcctgccggcgccgaagatccgtgccgatggcgcgttgctagcgcctgaagcgccggcggcgttcgattatcccgcggcggacatcgggaatgactatcccgccggcgaggaggccgcgctacagaggctgcgcgccttttgtcgtgagcaagtgcaggattaccttcgccagcgcgatctgcccgccatcgccggcaccagcagcctgtcgccttatctggcgatcggcgcgctgtcgccgcgccagtgttttaaccgcctgcgcgccgaatgcccgcagctgctggaagatcgcgagagcggcgctttcgcctggctgaacgagctgatttggcgcgagttctaccgccatctgctggtggcctatcccgagctgtgccgccatcggccgtttatcgcctggacggacaaagtgcgctggtgcgatgacgcggcgaagctgcaggcctggcagcggggcgagaccggctatccgatcgtcgatgccgccatgcgccagctgaacgctaccggctggatgcataaccggctgcgcatgatcagcgccagtttcctggtgaaggatctgctgatcgactggcgggccggggagcgctacttcatgtcgcaactgctggacggggatctggcggccaacaacggcggctggcagtgggcggcttccaccggcaccgacgccgcgccgtatttccgcatcttcaacccgaccacccagggtgaacgttttgatccacaaggcacttttatccgtaaatggttgccggaactggcggatgtgcccgacaatgacatccatcatccccacctctgggcggaaaagcagccatgcgtgctgaattacccgctgccgatcgtcgatcataagcaagcccgcctggagacgctggcggcgttcgaggcggcgaaacggggagagtcttgaggcaactgcaaggagcgacgcaatgatgaaaaaggtgctggccctgtgcctgagcggctattccgcgctggcgatcgccggctttgacgtggtggcgctgggcgtcgacggcggcgtcagcgacggcaacctgacttcctacctgatccgcagcgacaatcagccgcagtatgtggcgctggacgccggttcgctgctgccgggcatcgccaaagggctggagaagggcagcttcccgcaggtgacgcccgagctggccgcgccttatacgtcgcagggctacgtgtttcggcagttgatcggcagctactttatcagccacggccatctggaccacgtggcggggctgatcgtcggctcgccggaagacaataaaaaaaccgtttacgcccaggcggacaccgtgctgaccctgcgcaaccattactttaactggaaggcctggccgaactttaccgatgccggcaacggtgcgcggctgggcacctaccggctgcaaacggtgcggccgcagcagcggtttaccctcggactgaccgggttgaccggcgtgatgtatccgctcagccacgatcgctacccgtcgtcgatgctgctgatttccaacggcaacgagttcttcgcctatttcggcgataccgggccggataaggtggagcagtcgcgcgatctcgataccgtctggcgcgtgctggggccgcttgtcgagcagaaaaagctcaagggcatgattatcgaaacctcttaccccaacggggtggaggacaaacatctgtacggccatctgacgccggcctggctgctgaaggagctgaagaacctgacgcagtacagcggcggcgaaggctcgctgaacggtctgccggtggtcatcagccacatcaaacccagcctgaagcagggcgaagacgcgcgcgccgccattgcgcagcagctggcgcagggcaacgatctgggggtgaaattcatcctgatggcgcagggcgaccggcagacattttgactatgaagagagaagagaatgcgtaacctcgatctggaacaactgatcaacacggaactgaacgccgcggcgtttcaggactacgcccccaacggtttgcaggtagaggggcgtgcgcatgtacagcgcatcgtgaccggcgtcaccgcctgtcaggcgctgctggacgccgcggtggcgcatcaggccgacgcgattatcgtgcatcatggctatttctggaaaaacgaggcgccggcggtgcgcggcatgaagcgcaaccgcctgaaaacgctgttgacccacgacatcaacctgtacggttatcatttgccgctggacgcgcatccggtgctgggcaacaacgcgcagctggcgcaggcgctgggcattcgggtgattggtgaaatcgagccgctggtaccgcacggggaattcgaacagccgctgaccggcgaagcgctgcaacagcgcatcgaaagccggctggggcgcgcggtgctgcactgcggcgataacgcgcctgagcatattcgccgggtggcctggtgcaccggcggcggtcagggctttatcgacagcgcggcgcgcttcggcgtcgatgcgttcatcagcggtgaagtctctgagcagaccattcacagcgcgcgcgaaatgggcgtgcatttcttcgccgccggtcaccacgccaccgagcgcggcggcgtgaaggcgttgggggactggctggcccagcaccacggctttgatgtgacctttatcgatatcccgaatcccgcctgatctttttcttccccggatccagcccggcctgcgcgccggctgaatccttttatcgcgctatttccttattttccttatggttgcgttctattgacagccggggccgcgtcacgcataactggtgtgtttttcagcgcgataataaggagaataagggtgcaacaagcacgttattacctgttgggtgaaagagcggtagtgcttgaactgtcgccgccggtgacgttaccgagccagcagcgcatttgggcgctggcggaaaagctgaatcaccatcccgacgtgcgggaagtggtgccggggatgaataacctgacgctgctgctgcatacgccgcaggccgacgccgaagcgatgctggcattgctgcagcaggggtgggagagcaaagagcgcctgacgccggaatcgcgtcaggtggatattccggttatctacggcggggaacagggccccgacctggatgaggtggcgcgtcataccggcatgacgccgcaacaggtggtggaatgccacgcggcggcggcctatgtggtctatttcctcggctttcagccgggcttttcctatttgggcggcatgccggaacaactggcgacgccgcgccgcgctgaaccgcgtctggcggtggcggccggctccgtcggcatcggcggcggccagaccggcatctatccgctggtgacgcccggcggctggcagctgattggccgcacgccgctggcgctgttcaatccgcatgaaatgccgccgacgctgctgcgcccgggcgatagcgtacgctttgtgccgcagaaggagggcgtatgctgattattctgcgcgccggcatctataccacggtgcaggatttgggccgtgaaggatttcgccgtctgggcatcagtaccggcggcgcgttggatcaaccggcgctgaagatcgccaacctgctggtgggcaacgcgccggaggccgccgggctggagatcacgctcggccagttcagcgccgagtttacccgtcccggctggatcgccctgaccggcgccggctgcgacgcgcagctggacggtaagccgctgtggaccggctggcgctacccggtgaaaaaggggcagcgtctggtgctgggcacgccgaagcgcggcatgcgcagttatctcgcgatcgccggcggtatcgccgtgccggaaatgttgggctcgcgcagcaccgacatgaaagccgcttttggcgggtgcgaggggcgtaatctgaaggacggcgatcggttgccgctgggtaaatccgccgctgaaccgcaaacccgctgtggcgtgaagcagttgctgttcaccaatcgcatccgtgcgttgccggggccggagtacgccgaattcagcgaagaggcgcaagatacgttttggcgcgccgcctggcagctcagcccgcagagtaaccgcatgggctaccgtttgcacggcggcacgccgctggctcgcaccaccgacagagagatgctgtcgcacggcctgatgcccggcgtggtgcaggtgccgcacaacggccagccgatcgtgctgatggccgatgcgcaaaccaccggcggttacccgcgcatcgcctgcgtgatcgaagccgatctttaccatttggcgcagatccgtctcggcgaaccgatccatttcgtgctctgttcactggccgaggcgcagcgcgccaaggccgagcaggatcttttccttcgacagattgcctgggggttacatgatcgttgatttgaacgccgatctcggcgaaggctgcgccaacgaccaggcgctgttgcaattggtgagctcggccaacatcgcctgcggcttccacgccggcgatgcgcagaccatgcgtcagtcggtgcgctgggcattgcagtacggcgtggcgatcggcgcccacccgagttttcccgatcgggagaatttcggccgcactcgcatgcagctgccgccggaaacggtgtacgcgcaggtggtgtatcagctcggggcgctggcggccatcgcccgcgccgagggcggggtgatggtgcatgttaagccgcacggcatgctgtacaaccaggcggcggttgagccggcgctggcagaagccatcgcccgggctgtgcaggcggtcgatccggcgctgcggctggtggggctggccggcagcgagctgatccgcgccgggcaacggctcggtctgaccacccggcaggaggtgttcgccgatcgcggttatcaggccgacggcacgctggtgccgcgcggtttgccgggggcgcttatcgaggatgacgaacaggcgctggcgcaaacgctggagatggtgcgccatcaccgggtgcgcagcgtcgatggcgtttggaccgccgtacaggcggagaccgtctgcctgcatggggacggcgagcatgcgctggcgtatgcgcgcaagctgcgggacagttttgttcagcaggggatccgcgtcagcgcggagcagtaaagcaagacacaacatcacaagcaaaaaactattagaaaatatcgagggaagactatggaacaggccgtgaatctctggccactgatcggcatcgccgctatcgtggtcgggtttgtattgcgtttcaacccggtgctggtggtgatcgccgccggcatcattaccggtctggcggcgctgatgccgctggacgtcattctggaaaagctcggcgagggctttctcaatacccgcaacctgccgctgatcctgctgctgccgctggcggtgatcggcctgctggagcgccacgggttgaaagagcgggcgcaggcgtggatcgccaggatcaaaagcgccaccgccggccgtttgctgatcgtgtacctgttcgtgcgcgagatcaccgcggcgatggggctgaccagcctgggcgggcacccgcagatggtgcggccgctgctggcgccgatggcggaaggggcgacggaaaaccgctacggcgagctgccggagcgtacccgccaccgcctgcgcgccatgtcggccgccaccgacaacgtcgggctgttcttcggcgaagatatcttcgtggccttcggcgcgatcatcttcatgcacaactttatgctggagtccggcggcattcagaccgagccgctgcatatcgcgctgtggggcattccgaccgccattttcgctttcctgatccacgccttccggctgtatcggatggataaacagctgagtgccgagctggcgcagctgaatcaggcggcgctgcaggcgaagggggaagcacgatgaacttccagcaacaatatctctactggctggccggcgcggtgctgctgattgtggcggtgatgtccttccgcgatcgcgccaacccgcgccgcatcaccaccgggctgttttgggggctgtacggcctggtgttcctggtcggcgactggacttaccgcctgctgggcgacgtgctcggcgaaggcagcaacgagaaacgcatgctgcacatcatcgttggcgtggtggtggtggtgatggccctgatcgccggcttcggcggcgtgcgcctcggcagctatcatcagcgaacgccgcaggagcgcgaggccagcgccaagcgcctgggcaacaagctgtttatccccgcattggcgatcccggtggtgacggtgatcggcgtgctgctgttcaacaatattccggcgttgcaaagcgcggtgttcggcagcggtaaccatgcgacactgatcaccctgttctctatgaccgtcggctgcctgatcggcctggcgatcgcggtgaaaatgacccatgagaaggcgttgcagccgatacaggaagcgcggcgcctgctggattcgatcggctgggcgttcattctgccgcagatcctcgccacgcttggcctgctgtttaccgtcgccggcgtcggcaccgcgatctcgcatttgacccaagagtatctggcggtggataaccgcttcatcgccgtggcggtctacgctatcggtatggcggtgctgaccatggtgatgggtaacgccttcgccgcgttcccgatcgtcaccgccggcatcggcattccgatcctggtgctgcagcacggcggcaacccggcggtgatggcggcgatcggcatgttctccggctattgcggcaccctgatgacgccgatggcggcgaacttcaacattgtgccggcggcgctgctggagctgccggacaagaatgcggtgatcaaggcgcaggtgccgaccggcgtgctgctgctgttggttaacgtgttcctgctgtatttcctgatgttcctgtaggagtaaggatgcaaaaagtattgattaccggctttgagccgtttggcggcgagcggctcaacccttcctgggaagtggtgaagcagctcaatgatatggagctggtgggtacgcgcattgtggcgcgccagctgccgtgcgtgttcggcgcggcgctggaggcgctcaatgcggcgatcgacgaggtgcagccgctgatggtgctggctgtcggccaggccggcggccgcaccgacatcacgattgaacgggtggcgatcaacgtcgacgacgcacgtatccccgataatcaggggcagcagccggtggatgagccgatcgtcgccggcggcccggcggcctatttcagcaccttgccgatcaaggcgatggtcagctcgatgcgcgaggccggcattccggcctccgtttcgcagaccgccggcacctacgtgtgcaaccatgtcatgtacggcctgctgcaccggttgagcggccagcgcgaggtgaagggcgggtttattcatatcccgtacctgccggaacaggcggcggcgcaccccggcgcaccgagcatggcggcctcgacggtgctgtttgcgctggagctggccgtttccatcgcgttgcaggtggaacacgatctgaaagtggcgggcggcgcaacgcattaatcaagagaatccccggcgcatcgggctgcgccgggtctacgcaaggagtggtctatgccggaaggaccggagatccgccgggcggcggacaaactggcggcggcggtgatcgatcagccgctgaccgccgtcgatttcgcttttcctcagctgaaacattatcgccagcgtttgctcggcgagcgcatcgtcgccatcgagccgcgcggcaaggcgctgttgacccacttttccaacgggctgacgatgtacagccataaccagctgtacggcgtgtggaaagtggcggcggcgggggagacgccggagaccaagcgcgatctgcgggtgcggctggaaaccgcccaccgcgcgatattgctctacagcgcttccgacattaccgtcgggccgcgcgaggaaatagagcaacacccgtttttgcaacgcatcggccctgacgtgttggacatgtcgctgacggtagacgatgtggtggagcggttgctgacgccgcgttttcgccgccggcagctgagcggcatgctgctcgaccaggcgtttctcgccggattgggcaactatctgcgcgccgaaatcctgtggcaggccgagttggcgccgcagcacaaaccacaggatctggcgccagaggcgctgcgccacctggcggaggcattgctggcggtgccgcgcctttcctaccagacgcgcgggcaggcggatgacaaccgccatcacggcgcgctgtttcgcttcaaggtgtttcatcgcagcggcgagccctgtgagcgctgcggtgggatgatcgtgcgcaccgagctgtcgtcgcggccgttttattggtgcccgggctgccagaaataagcaaaaaaaaacgccgcccgaaggggcggcgctgtgcggtttcagccggggaagcggcttacttggttttcagctgggatttgaaatcacgctcggcatagccggtgtacagctgacgcggacgggcaattttgatgccttcgtcgtgcatttcgttccagtgggcgatccagccgatggtgcgcgcgatggcgaagatcacggtgaacatggaagaaggaatgcccatcgccttcaggatgatgccggagtagaagtcgacgttcgggtacagtttcttctcgatgaagtacgggtcgttcagcgcgatgtgttccagctccatcgccacctgcagcaggttgtcgtccttcttgttcagctctttcagcacttcgtgacaggtctcgcgcatcacggtggcgcgcggatcgtagttcttgtacacgcggtggccgaagcccatcaggcggaaggagtcgttcttgtccttggcgcgcttgatgaattccggaatgtgctcgacggtcttgatctcttccagcattttcagcgccgcttcgttggcgccgccgtgcgccggcccccacagggaggcgatgccggccgcgatgcaggcgaacgggttggcgccggaagagccggcggtgcgcacggttgaggtagaggcgttctgctcatggtcggcgtgcaggatcaggatgcgatccatggcgcgttccagtaccgggttcaccacgtactcttcgcacggggtggcgaacatcatgtgcaggaagttgccggcgtaggacagatcgttgcgcgggtaaacgaacggctggcccagggagtatttgtagcacatcgccgccacggtcggcattttggacagcagacggaacgcggtgatttcacggtgacgctcgttgttgacgtccagcgcatcgtggtagaacgccgccagcgcgccggtcacgccgcacagcaccgccatcgggtgcgagtcgcgacggaagccacggaacagatgggtgatctggtcgtggatcatggtgtggcgggtcacggtggtcttgaaggtttcgaattcttccggcgttggggtctcgccgtacagcaggatgtagcacacttccaggtaggaagattctttcgccagctgctcgatagggaagccgcggtgcagcagcacgcctttgtcgccgtcgatgaaggtaatcttggattcgcaagaagcggtggaggtaaagccgggatcaaatgtgaaataacctttggaacccagagcgcggacatcgaggacatcggggcccagtgtcggtgtcaatacgcccagttcgatcggagcttcgctgtcgttaatggttagcgtcgctttcttatcagtcatttactgtctccttagcgccttattttaaaaaccactaacaactgaaataccttaaatctctgcaggttgcccgcaaaaaaatggtgcggacgctaactctgtgagcgactgcgcaactgtgcgcgggtagggtacagagtgctgaccaggcgaacgagacgggtgaccagttgttaacgattcatagtaattcgttatagtctgttaatcttacctatgagctgttcgaagagatgtgaacctatcccaataatctgtttttgtgtgctttatttgctttagacgccggcaaactcgagcgggaaacaacggctattgggataggttcgccaaatacactgttgcataactcgaacccgggaggaagtgtatctgctgacccatagcgcatcataggaccgtttgtgcccctatatgtaatggaaatgttgatctcttgtcaaatcagataattaattttgcactaattgtgaaatccgtgatctgaatcactgttcgggggaaatgttatcaaagcggttgtatgagaattgtaatcagaatgtgatcctcctatactgccgccaggtctccggattaccctgaagtaggagcacccagcgttataaatgcgcgccgtttgagcacagaggatgttgatgtttgagcgcgtgacgtgtaagggttttaggctcttaacgctgtctgatccccgcccaggcccggaggaaggaaaataataagagctgtgtgggcaaatacgtgaaaaaacaacgacctgtcaacttggatctgcaaacgatccggttccccgtaactgcgatagcgtctatcttacaccgagtctctggcgtaattaccttcgttgccgtgggtatcctcctctggctgctgggcctgtcactctcttcccaagaggggttcctgcaggcggccgccatcatgaatagcttcatcgtcaaattcatattctggggcatcctcacggcgctggcctatcacatttgcggtggcatccgtcacttgttaatggattttggctacatcgaagagagtttggccgccggcacccgttccgcccaggtggcgatcggtctgaccgtcgtgctgtcagttctggctggagtcctcgtatggtaaacaacgtttctgcattagggcgcaacggcgtgcacgattggctgctgctgcgcgcttccgctatcatcattaccctgtacgtcctgtatatcctgggctttttcgtcacggctccggaactcacttatgacatctggcgcggtttcttcgccacttccattacgaaagtgttcactctgctgaccctgctgtcgattctggtgcacgcctggatcgggctgtggcaggtgctgacggactacgtcaagccgctggcggttcgcctggtgttgcagctggctgtcgtggtcgcgttgctggtctatttactgtacggaacaatcgtagtgtggggtgcttaaatgaaactgccagtcagagagtttgatgccgtcgtaatcggcgccggcggtgcgggcatgcgtgccgcgctgcaaatttcccaagcgggctcgacctgtgccctgctgtccaaagttttcccgacccgttcccataccgtgtctgcacagggcggcatcaccgtcgcgctgggcaacagccacgaggacaactgggaatggcatatgtacgacacggtgaaaggttccgactatatcggtgaccaggacgccatcgaatatatgtgtaaaaccggcccggaagcgattctggaactggaacacatggggctgccgttctctcgtctggacgacggccgcatctatcagcgcccgttcggcggccagtcgctgaacttcggcggcgagcaggcggcgcgtaccgcagccgcagccgaccgtaccggccatgcgctgctgcacaccctgtatcaacagaacctgaaaaaccacaccaccatcttctccgagtggtatgcgcttgatctggtgaaaaaccaggacggcgcggtggtcggcaccacggctatctgcatcgaaaccggtgaagtggtttacttcaaagccaaggccaccgtgctggcgaccggcggcgctggccgcatttaccagtccaccaccaacgcccacatcaacaccggcgacggtgtcggcatggcgctgcgcgccggcgtgccggtgcaggacatggaaatgtggcagttccacccgaccggcatcgccggcgcgggcgtgctggtgaccgaaggctgccgcggcgaaggcggctacctgctgaacaagcacggcgagcgcttcatggagcgttatgcgccgaacgccaaagatctggcgggccgcgacgtggttgcccgttcgatcatgatcgaaatccgcgaaggccgcggctgcgacggtccttggggcccgcacgccaagctgaagctggatcacctgggcaaagaggtgctggaatcccgtctgccgggcattctggaactgtcccgcaccttcgcgcacgtcgatccggtgaaagagccgatcccggttatcccaacctgtcactatatgatgggcggcattccgaccaaggtgaccggccaggcgctgaccgtgaacgagaaaggtgaagacgtggtgatcccggggctgttcgccgtgggcgaaatcgcctgcgtatcggtgcacggcgccaaccgcctgggcggcaactcgctgctggatctggtggtgttcggccgttccgccggcatgcacctgcaggaatcgctggaagagcagggcgtgagccgtgacgccagcgactccgacgtggaagcctcgctggatcgtctgaaccgttggaacaacacccgttccggcgaagacccggtcgaaattcgcaaagcgctgcagtcttgcatgcagcacaacttctcggtattccgcgaaggcgatgcgatggccaagggcctggaagaactgaaagtgatccgtgaacgtttgaagaacgcacgcctggacgatacctccagcgagttcaacacccagcgcatcgaatgcctggagttggataacctgatggagaccgcgtattccaccgccgtgtcggccaacttccgtaccgagagccgtggcgcgcacagccgcttcgactatccggaacgcgatgacgccaactggctgtgccattcgctgtatctgccgcaatcggaaagcatgacgcgccgcgaagtgaacatgcaaccgaagctgcgcccggcattcccgccgaaagtgcgttcttactaattgcggagatcgacagatgaaactcgaattttccatttatcgctacaacccggatgtcgacgatgccccgcacatgcaggactacaccctggaagcggaagaaggccgtgacatgatgctgctggatgcgttgatccagctgaaagaaaaagacccgaccctgtcgttccgtcgctcatgccgcgaaggcgtgtgcggttccgacggcctgaacatgaacggtaaaaacggcctggcgtgcatcactccggtttcgtcgctgcgcaaaggcaacggcaagatcgtgatccgtccgctgccgggcctgccggtggtgcgcgatctggtggtggatatgggccagttctatacccaatatgaaaagatcaagccatacctgctgaacgacggcaagaacccgccggcgcgcgagcacctgcagtcgccggagcagcgcgccaagctggacggtctgtacgagtgcatcctgtgcgcctgctgttcgacctcttgcccatcgttctggtggaacccggacaagttcatcggcccagccggtctgttggcggcgtatcgcttcctgatcgacagccgtgacacggaaacgcaagaacgtttagatgatctggacgacgcttttagtgttttccgctgccatagcattatgaattgtgtcagtgtatgtcctaaaggcttgaacccgacgcgtgcgatcgggcatatcaagtccatgctgctgcaacgcggcgcataaacggaatgagatgctgcgccgggctcttttccggcgcacgtcccataggggagggaacctctaaaaactgacccgcggctgcggcgctatgcagcctggttcttccgccggtttttagaggttccttgtaagggaccgcaaggtccataacagaacgtatcgggccgacatggccgcaagtacgtcgagtgaaccgttttacggcaaaccgtattcatcacggtaattatgttaaccacggcgaaaactaaagcttcaaagcttaagggatcatgatgcagaacggcgcaatgaaggcctggctggattcctcctatctggcgggcgcgaaccagtcttacatagagcagctctatgaagacttcttaaccgatccgggttccgttgaagatagctggcgttccatttttcaacagctaccaaccgcgggtgtcaaacccgatcagcttcactctcaaacgcgcgattacttccgccgcctggcgaaagactccgcgcgctacaacaccaccatcaccgatccggaaaccgacgccaaacaggtcaaggtactgcagctgatcaacgccttccgcttccgcgggcatcagcatgccaacctcgatccgctcggcctgtggcagcgcgagcaagttcctgaccttgatcccgcttaccacaacctgaccgaagccgatttccaggaaaccttcaacgtgggctctttcgccatcggcaaagaaaccatgaagctgggcgatctgtacgccgcgctgaagcagacctattgcgggtcgatcggcgctgagtacatgcacatcaccaacaccgaagagaaacgctggatccagcagcgcatcgagtcggtggtggggcgcgccagctttaccgccgacgaaaaacgccgtttcctgaacgagctgaccgcggcggaaggcctggagcgctacctgggcgccaaattcccgggcgccaaacgcttctcgctggaaggcggcgacgcgctggtgccgatgctcaaagagatggtgcgccacgccggcaagaacggcacgcgcgaagtggtgttgggcatggcccaccgcggccgtctgaacgtgctgatcaacgtgctgggcaaaaagccggccgatctgttcgacgaattcgccggcaagcataaagaacacctcggcaccggtgacgtgaaatatcaccagggcttctcctccgacgtggaaaccgaaggcggcatggttcacctggcgctggcgttcaacccgtcgcacctggagatcgtcagcccggtggtcatggggtcggttcgcgcccgtcgcgatcgtctggacgaagcgcgcagcaacatggtgctgccgatcaccatccacggcgacgccgccattaccggccagggcgtggttcaggaaaccctgaacatgtctcaggctcgcggctacgaagtgggcggcaccgtgcgcatcgtcatcaacaaccaggttggcttcaccacctccaacccgctggatgcgcgctctaccgaatattgcaccgacatcgccaaaatggttcaggcaccgatcttccacgttaacgcggacgatccggaagccgtggccttcgtcactcgcctggcgttggatttccgtaacacctttaagcgtgacgtgatgatcgatctggtctgctaccgtcgccatgggcacaacgaggccgatgagccgagcgccacccagccggtgatgtatcagaagatcaagaaacaccctacgccgcgcaaaatctacgctgacgttctgaccgaacagaaagtggccagcctggaagatgccacggaaatggtcaacctgtatcgtgatgcgctcgaccgcggcgattgtgtggttgaagaatggcgtccgatgaatctgcactccttcacctggtcgccgtacctgaaccacgagtgggacgaagagtacccgagcaaggttgagatgaagcgtctgcaggaactgggccgccgcatcagcaccgtgccggaagcgatcgaaatgcagtcgcgcgtggcgaaaatctacgctgaccgcgccgagatggccgcaggcaacaagccgttcgactggggcgccgccgaaacgctggcctacgccaccatggcggatgaaggcattcccatccgcatctccggcgaagacgccggccgcggcaccttcttccaccgtcacgcggtggtgcacaaccagaaaaacggttcggtctacgttccgctggcgaacatccacagcggccagggcgaattcaaggtctgggactccgtgctgtctgaagaagcggtgctggcgttcgaatacggctacgccacggcggaaccgcgcacgctgaccatctgggaagcgcagttcggcgacttcgccaacggcgcacaggtcgttatcgaccagttcatcagctccggcgagcaaaaatggggccgtatgtgcggcctggtgatgctgctgccgcacggctatgaaggccagggccctgagcactcttccgcgcgtctggaacgttatctgcagctgtgcgctgagcagaacatgcaggtgtgcgtcccgtctacgccggcgcaggtttaccatatgctgcgtcgtcaggcgctgcgcggtatgcgccgtccgttggtggtgatgtcgccgaagtcgctgctgcgtcatccgctggcgatttcttcgctggacgagctggccaacggcaccttcctgccggcgatcggcgagatcgacgacttggatccgaaagcggtcaagcgcgtcgtgctgtgctccggcaaggtctactacgacctgctggaacagcgtcgcaagaacgagcagaaagacgtggccatcgtgcgcatcgagcagctgtatccgttcccgcatcaggccgtgcaggccgtgctggagcaatactcgcacgtgcatgatttcgtctggtgtcaggaagagccgctgaaccagggcgcctggtactgcagccaacacaacttccgtgaagtggtgccgttcggggcttctttacgttacgcaggacgtccggcctccgcttctccggcggtgggctatatgtccgtacaccagaagcagcagcaggctctggtgaacgacgcgctgaatattgactaatgttcgctcgcttgccggccgaggagccggcaagcagatgataaaaaacttaagggaaagctaaatgagtagcgtagatattctggttcctgaccttcctgaatcggttgccgatgcgaccgtagccacctggcacaaaaaaccgggcgacagcgtgcagcgtgatgaagtcctggttgaaatcgaaaccgacaaagtggtgttggaagtgccggccagtgaagcgggcattctcgatgctatcgtggaagaagagggcgcgaccgtgctgtctcgccagctgctcggccgcattcgcccaggcgacagctccggcaaaccgaccgccgagaagagccaggagaaagagtccacgcctgcacagcgcgcgaccgcgagcctggaagaagaaagcaatgacgcgctcagcccggcgattcgccgcctgatcgccgaacatgacctcgatgccggcgccatcaaaggcaccggcgtgggtggccgcatcacccgtgaagacgtggaagcgcacctggccaaaggcggcgctgccgccaaaccggccgccgccgctgaagccgcaccgcagccggctctggccggccgcagcgaaaaacgcgtgccgatgacccgcctgcgcaaacgcgtcgccgagcgtctgctggaagcgaagaacagcaccgcgatgctgaccaccttcaacgaaatcaacatgcagccgatcatggatctgcgcaagcagtacggcgaagccttcgagaaacgccacggcgtgcgtctgggcttcatgtccttctacatcaaggcggtggttgaagcgctgaagcgcttcccggaagtgaacgcgtctatcgacggttccgacgtggtttaccacaactacttcgacatcagcatcgcggtttctaccccgcgcggcctggtgacgccggtactgcgcgatgtagacgccatgagcatggctgacatcgagaagaaaatcaaagagctggccgttaagggccgcgacggcaaactgaccgtggaagagctgaccggcggtaacttcaccattaccaacggcggcgtatttggctcgctgatgtccaccccgatcatcaacccgccgcagagcgccatcctgggcatgcacgccatcaaagatcgcccaatggcggtcaatggtcaggtggtgatccagccgatgatgtatctggcgctgtcttatgaccaccgcctgatcgacggtaaagaatccgtcggttatctggtgacggtcaaagagatgctggaagatccggctcgtctgctgctggacgtctagtaacccttgccgggcgcggcgtgccgcgcccgcactctgtgctatgtggccggaaaaccatgcggtttaccgcgcaataatggtccggctaaaaaccttcagaactgaatggatagaacatcatgaatttacacgaatatcaggcaaaacagctgtttgctcggtatggcatgccggcaccgaccggttacgcctgtaccactccgcgtgaagcagaagaagccgcatccaaaatcggctccggcccgtgggtggtgaaatgtcaggttcatgctggcggccgcggtaaagcgggcggcgttaaagtcgtcaacagcaaagaagatatccgtgctttcgcggaagcctggttgggcaagcgtctggtgacttaccagactgacgcgctgggccagccggttaaccagatcctggttgaagcggcgaccgacatcgataaagaactgtacctgggcgccgtcgtagaccgcgcgacccgtcgcatcgtattcatggcgtctaccgaaggcggcgtggaaatcgagaaagtggcggaagaaaccccagaactgatccacaaaatgaccatcgatccgctggcgggtccacagccttatcagggccgtgagctggccttcaaactgggcctgaccggcaagcaagtcagccagttcgccaagatcttcatgggcctggcgacgctgttcctggagcgcgacctggcgatggttgagatcaacccgctggtgatcaccaagcagggcgatctggtgtgcctggacggcaaactgggcgccgacggcaacgccctgttccgtcagcctgaactgcgtgaaatgcgtgacccttctcaggaagacgagcgtgaatcccgtgcggcccagtgggagctgaactacgttgccctcgacggcaacatcggctgcatggtgaacggcgccggtctggcgatgggcaccatggacatcgttaaactgcacggcggcgaaccggccaacttcctggacgttggcggcggcgcgaccaaagagcgcgtgaccgaagcgttcaaaatcatcctgtccgacgacaaggtgaaagcggttctggttaacatcttcggtggtatcgtacgttgcgatctgatcgctgacggcatcatcggcgcagtggctgaagtgggcgttaacgtcccggtcgtggtgcgcctggaagggaacaacgccgaactgggcgccaagaaactggcggacagcggcctgaatatcattgctgcgaccagcctgactgatgcggctcagcaagttgttgcagcagtggagggtaaataatgtccatcttaatcgataaaaacaccaaagtaatttgccagggcttcaccggtagccaggggactttccactccgaacaagctatcgcttacggcaccaaaatggttggcggcgtcaccccaggcaaaggcggcactcagcacctggggctgccggtgttcaacaccgtgcgcgaagcggttgaagcgaccggcgcgacggcctctgtcatctacgttccagcgccgttctgcaaagactccattctggaagcgatcgatgccggcatcaaactgatcatcaccatcaccgaaggcatcccgaccctggacatgctgaccgtgaaagtgaagctggacgaagccggcgtgcgcatgatcgggccgaactgccctggcgtgatcaccccgggcgagtgcaaaatcggcatcatgcctggtcacatccacctgccgggcaaagtgggcatcgtttcccgctccggcaccctgacctatgaagcggtgaaacaaaccaccgatgccggtctgggccagtccacctgcgtgggcatcggcggcgacccgatcccgggctccaacttcatcgatatcctgaagatgttccaacaggatccgcagaccgaagcgatcgtgatgatcggtgagatcggcggcagcgctgaagaagaagcggcggcttacatcaaagaacacgtcaccaaaccggttgtcggctacatcgccggcgtgaccgcgccgaaaggcaagcgtatgggccacgcaggcgccatcatcgccggcggcaaaggcacggcggacgagaagtttgctgcgctggaagcggcgggcgtgaaaaccgtccgcagcctggcggacatcggcgatgcggtaaaagcggtgctgaagcgctaagaacctagtacgaaataacaatatctcgacatgtttggccacccattgggtggccttttttatgggcgaaactcagaaaccgttgagcgccttgatcagcgcgatccgatcctgcaggcggcgctgctgcaccggatccgcggcggcttgccgctgctgctccagcgaggcgagggcggcgcggtaatcgtcggcgttgcggaacagcgcgtctttgacgttgatcgaggcgacgttggtgtagcggccatcgtcggtggtcggcacctgaataacgccttcattcagcagccgtttaacgatcgcccgctgcggttcgtatccctccatgccgatcagtttccagcgctgcggcggcacgccctggtattggccgtgtttcacttccgtcaggtagcgcagggccaggtggcgaatggtgccttcttcttcaccgtactgcgctttgctgtcgaacagcaccgggaaggattgcccttccagcgcgccgcccttttgcgtcaggtggcccatacggtaactgttcatgcccagacggatcggcatgtcgtccgtgaccggcgtgccgtccgccagatgcagatcgacgatgcgtgaaccggcgggttggcgcagatcaatggtataggtgacgccatcgaagaaatcgttggtggaatatttggacgaacgccgcgccgggttaaagctgtaggtgacgtcgcccggctgcagctgattgaagtagccggcggaccactccatgtagcgtttaagcgctttaccgttaagctgataaacggtgatctcgccaccggcgtattggtagttaaaggcgatatccttggccttgatgtcgccgacgtccagtttggcgcgatcgttgtcgatctgcagggcgatcacctgcgccagcggcgcatagtgccgggcggcctgctggaacagcgcgctgatgccggtgtcctgcacgtgcacctgaggaatgccgcggaactcgtcggcaggcaccagatcgctgccgctcagcttcgctaccacccggttggcgttggcgcgcaaaatgtcatgatacggctggtagagagcctgcatggcgctgtccggcgtcagccctttgatcgggtaggtgtagctgtttttgtcgatcagcgtgaatttgccgtcgcggcgttcaaattgcagatcgatacgtgacagcgcgcggccgtatttgtccggttcggtgatgatgacgccgttgaccaccgccttgtcgatcttcacatgcatgtggccggcgacgattgccgccagttccgggttggcgttggcaatgtcggccacgccggtgcccgggcgctggttctcgttgtcgatgcccatatgcgccaccagtacgatggcgtcgacctggccgtcgatttgtttgatgacctgtttcaccgcctgcaccggatcggtgaagttcagccctttgatgcgatcggtgcccttggcgaattcagcggtcatcggcgtgtccatgccgataatgccgatcttcacgccctgacgttcgaggatggtgtaggccggcagataaggcttgccgttgtcccagacgatgttgcccgccagcgccgcgcccttgaactgcttgagcggggtggccagcaccggcaggccgaagtcgaactcgtgattgcccatcacccagacgtcgtaattgagcgcattgaggcccagcatcatcgggctgatggcctcatgcttgaaggtttcaacgaagttgccctgaatagtgtcgccggcgtccaccaggatcaggttaggctgctcggcgcgcacctttttgacctgagtggctatctggctcaggctgcccgccaggttttccgtgtcgctggcgtagtcccagggcacgaaggtgccgtgcagatcggaggtgcccagcagggtgatgtttaccgtttcggcggccatggcgtttcccgagagtcccaagacagaggcaaagatgatttttttcataacttattgtcactcaatggaattttaacataagtggtcattttgctacaaaatcgcaacctttacgatcccatcgcgagaaatagactaatattggagagagatttgttgttttgtgactgcaatcactgtcacggcttaatggaaataaaaggttaattatgtcgcagaataagcgcgtaataatacaatggcggctcttttaaattacatttatttaacacaaaaatatcattaaaaaacaattaaaccattgcgcaacatgccctcaagaaaaataggcgaaatgtgctgatgaatatggaaataatatgcggataggcttaaattgtctcagatcaaattagcccgaagtacctctttcggctaagatttgacctgtaaccaaaagtccaacccacgtcacgtaaaaacctatttattgtgtgggattgggcgagtatcatccatgttgtgattatggatggttgatcttgttgcatttgttacccgttgtcggttttcagtggcgtgcttgtcggcggcccgaggggctattggccgagtgtgcggttgaaagcggagaagctggatcaaatttgttgtgtttaagggcattcactgcggggcgttactggcggctttgaaagaagtatgccgataaccgcgtgtcggagtcttcctgcgaggagcaaggagtcaagatgtttgatattgtcgaactgtcgcgcttacagtttgctttaacggcgatgtaccatttcttatttgtcccattaacgctcggtatggcgttcttgctggcaattatggaaacggtatatgtcctgtctggcaaacaaatctataaagacatgaccaaattctggggaaagttatttgcgattaactttgctctgggtgtggccaccggtttgaccatggagttccagttcgggactaactggtcgtatttctctcactacgtcggcgatatcttcggggccccactggccatcgaaggtttgatggcgttcttccttgaatcgacgctggtcggcctgttcttcttcggctgggatcgtctgagcaaggtgcagcacatggcggtaacctggttcgtggccctcggctcaaacctgtccgcgctgtggatcctggtcgccaacggctggatgcagaacccgatcgcgtcggatttcaacttcgaaaccatgcgcatggagatggtcagcttctccgagctggtgcttaacccggttgcgcaggtgaaattcgttcacaccgtggctgcaggctacaccaccggcgccatgttcgtgctgggcatcagcgcttactacctgctgaagggccgcgacatcgctttcgccaaacgctccttcgccatcgccgccagcttcggcatggctgcggtgctgtcggtgatcgtgctgggtgacgaatccggttacgaaatgggcgacgtacagaaaaccaaactggccgccatcgaagcggagtgggatacccagccggcaccggcgtccttcaccctgttcggcattcccgatcaggacaagatggaaaactccttctctattcagatcccgtatgcgcttggcctgatcgccacgcgttccaccgacacgcaggtcactggcctgaaagatctgctggcgcaacatgaagtgcgcatccgcaacggcatgaaagcctaccaactgctggaagagttgcgcggcggcaataccgatcctgcggtgcgtgcggaattcaacaaaaccaagcaagacctgggctacggcatgctgctgaagcgttataccccgaacgtcagcgacgcgacggaagcgcagatccagcaggcgaccaaggactccattccacgcgtggcgccgctgtacttcgccttccgcatcatggtggcctgtggcgtgctgatgctgctgattatcggcctgtccttcctgagcgtggtgcgcggccgcatcggccagaagaaatggctgttgcgtgcggcgctgtatggcctgccgctgccgtggatcgcggtggaagccggctggttcgtggcggaatacggccgtcaaccgtgggcgattggtgaggtgctgccgactgcagtcgccaactcttcgctgaccgcgggcgacattctgttctcgatggggctgatttgcggcttgtacaccctgttcctggtggctgaaatgtacctgatgttcaagtttgcgcgtctgggtccaagcagcctgaaaaccggccgctaccactttgaacaaccgactgccgccgtgcaggaagcgcgctaaacaggagtccacgtatgtttgactatgaagtactgcgatttatctggtgggtgctggttggcgtactgctgatcggcttcgccgtcaccgacggtttcgacatgggcgtcggcatcctggtgcgcatcatcggtaaaaccgataccgagcgccgggtgatgatcaactccatcgccccgcactgggacggtaaccaggtgtggctgatcaccgccggcggcgcgctgttcgccgcctggccgatggtctacgcagcggccttctcgggcttctacgtcgccatgatcctggtgctggcggccttgttcttccgcccggtcggttttgactaccgttccaagctggagagcagccgctggcgcaacatgtgggactggggcatcttcatcggttccttcgtgcctgcgttggtattcggcgtggcgttcggcaacctgctgcagggcgtgccgttccatgtggacgaatacctgcgtctgttctacaccggcaacttcttccaactgctgaatccgttcggtctgttggcaggcgtggtcagtctgaccatgctggtcactcagggcgcgacctacctgcagatgcgcaccaccggcgagatccacctgcggtcacgcgccgcagcgcagatcgcgacgctgatcatggcggtatgcttcctgctggcgggtgtgtggctggtgaaaggcatcgacggctacgtgatcacttcggcgctggacaccatggcggaatccaacccgctgcgtaaagaagtggcgcatcaggccggcgcatggctgatcaacttcaacaagtatccgctgctgtgggccttgcctgcactgggcgtggtgctgccgttgttcaccatcctgttctcgcgtctggagaaaggcgcgctggcgttcgtcacttcgtcgctgaccatcgcctgcgtcatcctcaccgccggggtcaccatgttcccgttcgtgatgccgtccagcaccgtgcctaacgtcagcctgaccatgtgggacgcgacgtcgagcctcttgacgctgaaagtgatgaccgtcgtggcggcgatcttcgtgcctatcgttttggcgtacaccagctggtcgtactacaaaatgttcggtcgtctcgacaagaactacatcgaaaacaacaagcattcgctgtactaaggataaggagctaaaccatgtggtattttgcctggattctcggaacgcttcttgcctgcgccttcggcatcatcacggcgctggcgcttgagcagagcgaagcgaccaaagctcagcaagacggtaagtaatgagctcgtccgtgattgacaagctgtacgctgtcaccgacaagggcccggttcgggccctttccctggtgctggcgttgattttggcggggtgtgtgttctgggatccgacgcgtttcgccgccaaaaccagctcgctggagatttgggaagggctgttgctgatttgggccgtatgtgccggagtgatccacggtttcggattccgcccgcagcgcagcgtctggcgcgcttttttcgcgccgcttccagcaattgtgatcttgtgcgcaggattactttacgtttctttataatctccccgatgtccccacgttatgggccctcacggcccataattattttcattcccatcttgtaacccattcccaacccgatccgtcttgcgtatagtagcagcgttaaattgcattgctgggaagtagagtgagtaatacgttgtttcgatggccggttcgcgtttactacgaggataccgatgccagtggtgtggtctatcacgcccgctacgtcgccttttttgaaagagcgcgcacagagatgctgcgtcagcacaactttcatcaacagcagctgctcagtgaacaagtcgcttttgtcgtccggcgcatgacggtggattatctggctccggctcgtctcgacgagcaactggaggtccagagtgaaatcacctctctgcgcggggcttctctcacgtttgctcaacgcattgtcaattctgacggggctctactgagccaggcagatgtcctgattgcctgtattgatccacaccaaatgaagccaagagcgcttcctaagtctattgtcgcggagtttaagcagtgactgacatgaacatcctagatttattcttgaaggcgagcctgctggttaagcttatcatgttgattttgatatgcttctcggtagcctcttgggcgatcatcattcagcgcacccgcatcctcaatgcggcgacgcgtgacgccgaagcctttgaagacaaattctggtccggtatcgagctttcccgtctgtaccaggaaagtcaggcgcgtcgcgatagcctgaccggttccgagcagatcttccattccgggttcaaagagttcgcccgtctgcaccgcgccaacaatcatgcgccggagtcggtgatcgaaggggcgtcgcgcgcgatgcgcatttcgatgaaccgcgagctggaaacgctggaaacccatattccgttcctcggcaccgtcggttctatcagcccgtacatcggcctgttcggcaccgtgtgggggatcatgcacgcctttatcgcgctgggcgcggtgaagcaagccacgctgcagatggtggcgccgggtatcgccgaagcgctgatcgccaccgcgatcggtctgttcgccgccatcccggcggtaatggcctacaaccgtctcaaccagcgcgtcaacaagcttgagcagaattacgacaactttatggaagagttcaccgctattctgcatcgtcaggccttctccagcgacagcaaataagtaggaggtagcatggcgagagtacgtggacgtagtcggcgtgagctgaagtccgaaattaacatcgttccgctgctcgacgtgttgctggtgctgctgctgatttttatggcaaccgcgccaatcatcacgcagagcgtggaggttgacctgccggacgccaccgattccaagacggtgtccagcgatgacaatccgccggtgatcctcgaggtttccggcgtaggtcaatacaccctggtggtggatcacaaccgtatggagctgctgccgcctgagcaagtcgcggccgaagccaagtcgcgtttggcggctaacccgaaaacggtctttttgatcggcggtgcgaaggaagtcccttacgatgagattatcaaggcattgaatattctccatcaggcgggcgtggcttccgtggggctgatgacccagccgatctgaccgtaaggccaacggcaacccggttcctgcgctgcggcccaggaaccccgtataagcaacaccagtttttgggaatctattttggtaaaggcaactgagcaaaacgataagctgaaccgcgccgttattgtttcggtcgttctgcacttcatattgattgccctgctgatttggggatcgctgcaggaaaaggtcgacatgggcgccggcggcggtggcgatggcaccgtggtcggtgcggtgatggtcgatcccggcgcggtggtggagcagtacaaccgccagcagcagcagagcaacgatgcgcagcgtgccgaaaagcagcgccagaaaaaagcggagcaacaggccgaagagcttcagcagaagcaggcggagcagcaacagcgcctgaaagagctggagaaagagcgtttggcggcgcaggagaaagccgcgcaggacgccaaggcgcaggctgagcaacagcagaaggcggcggagcagcaaaaacaggccgccgagcagcaaaaagcggcggaagccgccgcagccaaggccaaagagcaacagaaggtcgccgaagccgctgccgccaaggcgaaggccgaagcggacaaggtcgccaaggcgcaggcggaagcccagaagaaagccgaagcggaagccaagaaagaagcggctgctgccgccgccgccaagaaacaggcggaagaggcgaagaaagccgccgccgccgcggcagaaaagaaagccgcagaggccgcggagaagaaagcggccgctgaagctgagaaaaaagccgcagcggaagccgagaagaaggctgccgccgaggcagagaagaaagcggcggccgagaaagccgctgccgccaagaaagccgctgcggacgccaagaagaaggccgccgccgaggctgcgaagcagtcggcggaagttgatgacctgtttggtggcctggcggacggcaagaacgcgccgaaaggcggcggtgccaaatcgaaaggtgatggtaaaccggccgggcagggcaatgccaaaacggctggcgccagcggggcggatatcagcggttatatggggcagatccaaggggcgattcagagcaaattctatgacgccagttcgttcgccggcaaaacctgcgacctgcgtatcaagctggcgccggacggcctgctgataagtgtacaagcggcgggcggcgatcctgctttgtgtcaggccgcggtctctgccgccaagttggcgcatataccgaagccgccgagcgatgccgtttatcagcactttaagaattctatccttgaattcaaaccgcaataacggttgattgagtgagtaatatcacagggatgtactaaggtaaccaacagggattatgtagttttgcgtaagttggtttgttaaaattctgctaatttatcgcaggcatcccgcctggataagggagatgagatgaagcaggcatttcgagtagcgctaggttttttaattctgtgggcgtccgtgttgcacgcggaagttcgcattgaaatcacccaaggggtcgactccgctcgcccgattggcgtggtgccgtttaaatgggcgggcccaggcacgccgccggaagatatcggcaagattgtcggcgcggatctgcgcaacagcggcaaattcaacccgatcgacgtggcgcgcatgccgcagcaaccgacctccgcgtctgaagtgacgccggcggcctggactgcgctgggcatcgacgccgtggtagtcggccaggttcaacctggcgccgacggcagctacctgatctcctaccaactggtggacacctcgggttcgccgggcaccgtcttggcgcagaaccagtataaagtgaccaaacagtggttgcgttattctgcccataccgccagcgacgaagtgttcgagaagctgaccggtatcaagggcgcgttccgcacccgtatcgcctacgtggtgcagaccaacggcgggaaattcccgtacgagctgcgcgtagcggattacgacggttacaaccagttcacggtgcaccgttcgcctgagccgctgatgtcgccggcctggtcgccggacggcagcaaactggcttacgtgaccttcgagagcggccgctctgcgctggtggtgcagaccctggctaacggcgctatccgccagatcgcctcgttcccgcgccacaacggtgcgccggcgttctcgccggacggcagcaagctggccttcgcgctgtccaagagcggcagcctgaacctgtacgtgatgaacctcggctccggccagatcacgcagctgaccgatggccgcaacaacaacaccgaaccgacctggttcccggatggccagtctctggcgtttacctccgaccagggcgggcgtccgcagatttataaaatcagcgccagcggcggtgccgcacagcgtctgacgtgggaaggctctcagaaccaggattctgaagtcagctccgacggtaaattcctggtgatggtgagcaccaacagtggtgcacaacacatcgccaaacaagatcttggatcgggcgccgttcaggttttgaccggcaccttcctggatgaaacgcctagtattgcgccaaacggcaccatggtgatctatagctccacgcaaggtatgggctccgtgctgcagttggtgtcaactgatgggcgtttcaaagcgcgtcttccggcaactgatggacaggtcaaattccctgcctggtcgccgtatctgtgatgcatgtgtaaatatgtatggcaaactataaaaggatcaaagaaatgcaactgaacaaagtgctgaaagggcttctgctggcactgccagttctggctgtagcagcttgtagttctaacaaaagcgcgaacaacgaccaatctggtatgggcgctggcgccggcactggtatggaaaacggcagcagcaacctgtcttccgaagaacaagctcgtctgcagatgcaagaactgcagaagaacaacatcgtttacttcggcctggacaagtatgacgtaagctccgaattcgctcagatgctggacgcgcacgctgcattcctgcgtaacaacccgtcttacaaagtgaccgttgaaggccacgctgacgaacgcggcacgccggaatacaacatcgctctgggtgagcgtcgtgctaacgccgttaaaatgtacctgcaaggtaaaggcgtttccgctgaccagatctctatcgtttcttacggtaaagaaaaaccagcagtactgggccacgacgaagcggcttatgctaaaaaccgtcgtgccgttctggtttactaagagaatcgcatgaacagtaacttcagacgtcacctgttgagtctgtcgttactggttggcgtagcggccccttgggccgctactgcccaagcgccaatcagtaatgtcggctccggctcggtcgaagaccgtgtcacctcgcttgagcgcatcagcaatgctcaaggccagcttttaaaccaactccagcagcaactctctgacaatcaacgcgacattgattctctccgtgggcaaatccaggaaagccagtatcagttgaatcaggtcgttgaacgccagaagcaaatctatcaacagatggatagcctcagccagggcggcgctcagagcgcctctgcggcagcgggcgctgccggcggtgcagccgcaggcgcatcttccgatgcgggcagcagcgcgcctgcagccgcttctgcaacgccgagtggcggtgatgagaacagcgactacaacgccgctgtttctctggcgctggaaaaaaaacagtatgaccaggcgatttccgcctttcagtccttcgtaaaacagtacccgaagtctacttaccagcccaacgccaactattggctgggtcagttgttctacaacaagggtaaaaaagacgatgcggcctattattttgcggtggtggtgaagaattacgctaaatcaccgaaggcgcctgacgccatgtacaaggtgggtatcatcatgcaggaaaaagggcaggctgataaagccaaagccgtgttccagcaggtgattaaacaatacccaaccagtgcggcggccaagcaggcgaaaagtcgcgtaggcggttaacggttagaaaaatgagcccagaagttagtcgatttgaccgatttctgggctcattcgcgtgaagaacaagcagttgaacgcatcagtaaaaaatttaggttgcgctgccaagataaattagtaatatatgccgccgttgccaagacatcttgcaagatgttaaagcggcagggaaattgggtcgttagctcagttggtagagcagttgacttttaatcaattggtcgcaggttcgaatcctgcacgacccaccattcttagagaatggctgcaatagagaatcgtaaaggatgagaaccgtaaaggttcgagtctcgcaaagcgagacaacatcactccggtgatggcccgcaagggcgaggccaaaggccgagttatcctgcacgacccaccactcttagagaatggcagcttcagaataggtttgatgtggcaaagtaaaggtccgagtcgagtacccgtcgagttgtcctgaacatccccatccttgttttccgcgagtcggtttttgtaacctattcgccaccagcagtaaaccacatcagtgggtcgttagctcagttggtagagcagttgacttttaatcaattggtcgcaggttcgaatcctgcacgacccaccaattcagaaaaaagcgccttttggcgcttttttcgcatctgcagcaccccaacctgaatccctgctttctcgtttcaacaacacaccgatcatcatcccgcttttctctgaacgccatacgcccccaccaggacattatccgtcgtgatctgcgtggtcaatgtctgtgtttttaatctattaaacactgagtgcgtaaatatgaaaatatcagcggacttttcgcgcggttttaggtattttgtttagtatataaaactagggcgttgcggcaggcgatattcacgcggcaggcgcccagcctagcatgagattgcagcgatgagtgaaatgtttgatgtcaacgcggcggtgtatcccttcccgccgaaaccggtaccgctggacgtagcggaaaaagccttttatcgcgagaagatcaaaaccctgctcaagcagcgcaacgcggtaatggtcgcccattattataccgacccggaaatccaggcgctggcggaagaaaccggcggctgcgtggcggattcgctggaaatggcgcgttttggaagcgcgcatccggcttcgacgctgttggtggccggcgtgcgtttcatgggggaaaccgccaagatcctcagcccggaaaagcaggtgctgatgccgacgctgtttgccgaatgttcgctggatctgggctgcccggaagaggaatttcatgcgttttgcgacagtcatcccgatcgcaccgtggtggtttatgcgaatacctcggcggcggtcaaagcgcgcgctgactgggtggtgacctccagcatcgccgtcgaactgatcgagcatctggatagcctgggcgagaaaattatctgggcgccggatcgtcatctcggcagctatgtgcagaagcagaccggcgccgacgtgctgtgctggcaaggtgcctgcattgtccatgacgagttcaagacccaggcgctgcggcgcatgaaggcgctctatccgcaggcggccatcctggtgcatcccgaatcgcctcaggcggtggtcgagctggcggatgcggtgggatcgaccagccaactgattcaggcggcgaaaacattgccgcatcaacagctgattgtcgccaccgatcgcggtatcttttacaagatgcagcaggcttgtccggacaaggaactgttcgaggcgccgaccgccggagagggcgcgacctgccgcagctgcgcgcattgcccgtggatggcgatgaatggcctgaaggcgattgccgaagggctggagcaggggggcgcgcagcatgagatccacgtggacgccgcgctgcgtgaaaaggcgctggtgccgctgaaccgcatgctggatttcgccgctcagcttaagatgcaggttaaaggcaacgcttaaccgtttaaaaggatgacctcatgagcttcttcagtaccagcaatattctggtgcatattccgcttggcgcgggcggttacgatctgtcgtggatcgaagccatcggcacactgttcgggttgctgtgcatctggtacgccagcaaggaaaaaatcatcaactacctgttcggcctgatcaacgtcacgctgttcgcggtgattttcttccagatccagctgtacgccagcctgctgctgcagctgtttttcttcggcgccaacatttacggttggtatgcctggagccgccaaacccaggataaccaggccgagctgcagatccgctggctgccgctgccgaaagcgttggtctgggcggcggtttgcgtcatcggcatcggcctgatgactttcaacattgaccgcgtgttcgcctggctgacgcagattgcggtggcggtgatgcaagggctggggctgaacgtgcagatgccgacgctgcagccggacgcgttcccattctgggattcggcgatgatggtgctgtccatcgtggcgatgatcctgatgacgcgcaagtacgtggaaaactggttgctgtgggtggtgatcgatgtcatcagcgtggcgatctttgcctaccagggcgtgtatgctatggcgctggagtatgtcattctgacgctgatcgccctgaacggctcctggctgtggatcaagagtgccgggcgcaaccattccaatccgttatcttccgctccgtaataacagcagagggcgccgtgatggcgccctcttggcttagtggcgatgccccaggtgcgaatgcgcttcggcatgtgagtgttcactcggctccggcgcccggttgatgccgcagtccggcgtctcacagtgccggtactccatctgaatggtcacgtggccaatcttgtagtgttccaacagataagcctgaatgcgttgcaacagcccatcgtggtcatgcggcgggatcacctgcgcatgcagcgtcatcagcttctgttcgccgatctgccagacgtgtacgtggtggatattgcgcacttccgggatgttcaggcacaggtctttttgcagcttggcgatgtcgacctcctgcggcgtgccttccagcagctcgtggaagctctccttcagcagccgccaggcgctgcgcagcaccagacaggagaccagcaccgacaggatcgggtcaatcggcgtccagccggtggcaagaataacgatggcggcgacgatggcccccaccgagccgagcaggtcgcccagtacatgcagcgcggccgccctcacgttgatatttttctcttcgttgccgcgatgcagcagccagaaggcgaacaggttcgccagcagccccgctatggcgatgatcagcatcggagtgcccatcaccggctggggttcgaagaaacgccgtatcgcctcccacaggatgaataccacgatcaccagtagcgccgcggcgttgaggaaggccgccagggtggtcaggcgcagatagccaaaggtgtggcgcgcgttgggcttgcgctgggaaaagtgcaccgccatcagcgccaccagcagcgcggcggcatcggtcagcatgtgccccgcgtcggccaacagcgccagcgagccggacaacaggccgccgaccacctcggccaccataaagacggcggtgactaaaaaagcggtcagtaggcgtttactattactgtctttcggcaggtgtacgtgtggagtgtccgacattattcatccttatgcatagcgaaagtgggggcggcggcgagcagagcgtccagctccggttctatctgcgccactaacgcctttaatttagtataagcggcggcggcaaactcgccccgacgtgcggtttccaccagttgctggcacagctgcgcggcttccggcagctgaagcatcagcaggctgcccttgatgcggtgcgccgcctgttccaggcgtggccagtcgctcgcggcgacggcatccgcgagccgctgccggtcttgccgcagcgtgtcgctgagcgtctgcgccagccgctgcatcatggcgcgatcgccgcccgccatgtcggccagcatttgccgcaggtcagtaaggactaacttttcttcctgaacctgcggttgctgagccaatacctggccgatcgccgccagtgaaatcggcttggtcaggaagtggtcgatcgccaccagccctggcgggatgagggtaaactcctgcacgtctgccgagcagagcacgatgcggcaaggcgggcgccgtagccgctgttcgtcgcggcggatcagcctggccagcgtcaggccgtccgggcgcggcatgttatagtcgataaacagcagatcgaaaggctgccggcgctgagccttcagcagcgcatagccttgttcaaagcgggccggctgcagcccgaagtggcgcagctggcgttccagcaacaacaaattggtgggatggtcgtcgatcagcgcggtacgcaaggcggaagacggcagagcaaaggtgtgctcctcctgggcgccagccgtcgcggcgccgctcagctcgaccggtatcgcgacctcgacgcgggtgccgacgcccggctgcgagtgcaactcgatgcggccgcccatctgttcgacgatttctttgcagatcgacaggcccaaaccggtaccttgcaccgagatgcgttgcgcgccgcgcgcgcggtaaaacggttggaacaacttgcctacctcatcggcggcgatgccgcagccgctgtcgttcaccgttaactgcaactctccccgtcgttcatcctgtgcgcgccagccgacgtcgacctgaatggcgccgcgcggcgtgaactttatcgcgttgtttatcaggttgttagccacctgaagtaaacgctcaccatcaataatcaccgcctccggcagcgccggatccgccaccacgctcaaggtcaacggccgttcgccgataagcggccggtaaagggcgtcgatgcgcgcgacccaggggcgcagcgccaccggtttcggcgccagcgtcaacgacccggtttccagccgcgcgtgatcctgcaggtcgttgagcaggttgagcagcgatgaggccgaactgtaaatcaccggcaggccttccggcgcaggttggcgtttgagctccagttccagcaggccgaggatggcgtgcatcggcgtgcgcagttcatggctgacggtggcgaggaatttgctcttcatgcgattttccgcttcggcgcggcggcgcgcctgctcgagctcttcgcgttcgcgtttttcacggcgctgcagcatgaaacggcgcagcgtcagcgccagcagcagcacggtggcggcggccaacagcgccagcagccaggtggtctgcggcggcatgcggttgtcgttcaccgcgtcgatcaggttgctgcggtcgacgatccactcgtcgcgcagcgattgcagggtatccgccgggatctgcatcaggttcttatcgaggatcgccagcagcagcggttgatcgcggcgcacgccgaaggccaccggataggggatgttgttggcggcgaaggccagcttgatggcgccggaatagcgcgacagcgccaaaaagttggcggagatgacgttatccaccagcgcatccagctggccgttggccagcgcgtcgtacatcgatttgctgtcggcgaagcttacggtctgttcctgctccggcaccagcccctgagccaaatcgccctgcagtacgccgatgcgcttgccggccagatcgccccaggtcgagatgccgttggcatactggccgacgtaaacgccccacagcgaacggtggatcggcatgctggcgccgtagcgcgccttgacgccgcgcgccagcggcagggcggcgcggaagctggcctggccggattgcaccagccgatcggcctgctcggcgttgcgcgcccacagcggcgcgaaacgcagcccggtgttttgcgcgatgatgttgagaatatcgatggcatagccgcgcggctggccgtcggaaccgcggtaggcgaacgggaagttgttctcgatggcggcgtagtaaaccacgcggtggctcgccacccaattcttctccatcgtcgtcagatcggcattgccggtatcgaggtagctggggatctttttgctccagcggctctgcagggcattcatcagttccatcggcgcgtcggcgatggcggtgtccagcgtgtctatcaggcgcgggtcggcggcggcgaacacgaaggaaaggttgcccaggttctcgttgctttcaatctgatagagctggccgagctgcagctggtcgatgataaagctggcgctggcctcgtcggcgataaagtagtcgctgctgccgttcagcagcgaatagaccgcctgcagattgttgtcgtagcgctggatctgcgacgccaccgcctgcagggcgccgccggactgcatgtcggtcagcgcgccgatcgcgacgcgggcgttggcggaattgagcatcaccggccgatcgttgctgcgatcgcgcaatacgcgcaggttgctgacgtagtaaggctgggagatctccagcccgtgcagcgcttcgctctgcgggatgccgtacaacagatcgaccttgccgtcgtgcagcgcctgctccagctgggtcaggtcggcgaagccgtaaatggcgaagcggatgccggttacctgctggatatagccgaggtagtcggcgttcagcccatacagatcgtcatccacaatgatgttgtacgggctggtgttctcactgatgatgccgacgcgcagcgtgcggtcgcgccagggatttttctcgccgacgatcagcatattctcggggggattcaggttgctgaccagctgatagcgcaccggctccgccgcctgcgccaggccgcaccacaggatcagcagcagcagggcgcggcgcatcatggcgccagctctttaaacaccgccaccagctccagcaaattgccggcgccggttttgcgctggatgtttttcttgtgcgtgctgacggtcttgttgctgatgtgcagccggtcggcgatctgcaggttggacagcccctggctcagcaagcccagcacctcgagctccttgggcgtgagcagcccgccgtccgccgtcggcgcctcttcggccagcgcggcggcggggaagctggtttcaccgtccagcacctgctcgatcgcctgcaccaactccgccagcgagctgcctttattgacgaaaccgtcggcgccggcggcatgcgccatgcgcgcatacacatcggcctcttgcgcggtatagatcaggatcttttgttgcgggtagtggcggcggatttttttcaacagctgcagcccgtcgacctgcggcaggccgatatccaggatcaccaggccgaaagcggcctcggccagcagggccagcgcctgaacgtcgtcctgcgccgcctgcaggcggtaggcgcgggctgatttcattagcgccgcttccagtgcgacatggaccaccgggtggtcatcaactaataacagagagggcatgttcaactcgggtcactttatattccgatcgctagcatagcgaaaaaggaggctctgcgctcccctgatgaaacagcacaatctgctgttaatttggcggttccagcggcggggggcaaaggtgatttacagcgccattctcacaggctagattgttgggatctacaccgttacgcactgcgaaagaccccacgataccgaatggaaaagctatgaattaccaaaacgacgatttacgcattaatgatattaaggaactcctgccgccggtggctctgctggagaaattcccggccactgaacgcgcggcaaagacggtgtcccaggcccgcagcgcaattcacaatatccttcgtggcagcgacgatcgcctgctggtggtgattggtccttgctccatccatgatacccaagccgccaaagagtacgcggggcgcctgctggcgctgcgtgaagaactgagcggcgagctggaagtggtgatgcgtgtgtacttcgaaaaaccgcgcaccaccgtgggctggaaaggcctgatcaacgatccgcagatggacaacagcttcaacatcaacgacggcctgcgcctggcgcgcaagctgctggtggagatcaacgacagcggcctgccggccgccggcgaattcctcgacatgatcacgccgcagtacctggcggatctgatgagctggggcgccatcggcgcgcgcaccacggaatcgcaggtgcaccgcgagctggcctccggcctctcgtgcccggtcggtttcaagaacggtaccgacggcaccatcaaggtggcgatcgacgccatcaacgccgccggcgcgccgcactgcttcctgtcggtgaccaagtggggccactcggcgatcgttaataccagcggcaacggcgactgccacattatcctgcgcggcggcaaagagccgaactacagcgcggcgcacgtgaaggacgtcaaagccggcctgagcaaagccgggctgccggcgcaggtgatgatcgacttcagccacgccaacagcagcaaacagttcaaaaaacagctggacgtgagcgccgatgtttgcgggcaaattggcggcggtgaaaaagcgatcatcggcgtgatgatcgaaagccacctggtggaaggcaaccagaacctcgaaagcggcgaaccgctggtttacggcaagagcgtgaccgacggctgcatcggctggcaggacaccgaaaccgtgctgcgcgatctggcggcggcggtaaaagcgcgccgcggataaccgcaaacaatgaaaagggcccgatagcgggcccttgttttatccttgtcattgcacttctctgtattccacgactttaaggcttacagttaatgggccaattaagtctttaagcgacccccttcgcattattcctatttaagaaaagaataattgtcactgctcgcggcattgtgcttatataagacgctttttttattccataaaccccgcaggcctaataagtggggagtggtatgaccttattcctttcaggatgaaagaattatgacaaacaatacctcgcagccgctggggctgcaccggattaaattccatgggaaaggtggtgagtacttcgctatttggttagtcaatgcattattgaccgccctgaccctgggcatctattccgcctgggcgacggtgcgccgtcgccgctatttttacggcaacacggaattggacggcgatcgtttcgactaccatgcacaaccgctgcaaattctgaaagggcggctgttggtgatcggcggcatcatcgtgttttatatcttgctggcgataacgccactgttggggctgctggctttgctggtgttgcttgccctgctgccgtggatcgttatccgcagctggcgctacaatgcgattatgtcgagctatcgcggcgtgcgttttaattatgtctgccgcaccgggcgcgcctattgggctttactgttctgcccgttattgctgattatcgggctgtatgtcggtctgatcatcttgctcggcattggcagcggtcttggcagcatcaacgccatcgcttttatgctggtgctgacgttgattttggccgtgccggcatttgcggcggtaaatggtattattagcgcactgcagcatgatttgtacgttaataacctgttcttcgggcgcacaccgtttattgccgaactgaagaaatcggcctttatcaaatttgccttgatcggcctgctcatattcctgccatttatgttggtcgcgttggtgtgcatcggttcgttcttctttactctctatcagatggtgttgatgggtctgttgaccaacgaagccattgatgtgctggtgctggacaatatcagcagccttctgctgatgatggtggtgctgttgatcggcgcgctggtggccagcagctaccaggtcgttgcccagcgcaattatctgtttaaccaggcaaggctgaacggcgacatcaagctgcattcctcaatgaaaacgctgccatacatgggattgttgatcaccaataccctgattaccctgttctcgctcggtttggcgacgccggtggcggaagtgcgtcatgcccgttatctggcggcctgcacggcggttgaaggcgatctggcgctgctggacattacggcgcatcaagaaagcgccaacagcgcggtggccgaagaagcgctgcaggcgctggatctgggcggcaacttctgaggcgccgatgatccttgaaggcgcttatcagttgccgggacgggccgcacgtgaggcggctcgtctgctggtgaacgaaagcggcgaaggcgtgacgttgcagcggcaggatgaacagcgttacatcccgctgacggacatcaccgtttctgccgcgctgggcaatattccgctgacgctcaccttcaagggcggcgggcgctttgtacctgacgacgacgcggcctttcgccgctggttctatcagcgccgttcgccagggtgggtgcatcgtctggaacgccataaacgcggcgtcgccctggcgctgctgatgacgctgctggcggtagtggcttacgtttacgtggtgctgccgtgggcgagcagcgagatcgccatgcgcatccccacctcggtggaacagacgctgggcaaacatacgcagacgtttttggaccagagcggcttcgcgccctctgcactgccggccgagcggcaacgggcgttgcagcagctattccggcaggtgatgccggccgagatgcgccaggagcgcacgccgctctcgctgaagctgatggcggcgcccggtgcgccgaacgcctttatgttgcccgacggcacgctggtgctcagcgatagcctggtcaccttgtcaaaaaacgacgatggcctggcggcggtgatgctgcatgagatggggcatcacgctcatcgtcacccgatgcgcatgttggtgcgttcgtcactggtggcgttgacgctgatgtggatgacgggtgacgtcagcggcatcggcgatacgctgctgcagtctgcgtccttcgtgaatgagatgcagttttctcgcgggatggagcgtgaggcggatgcgtttgcgatagcggaaatgcagcgccaggggcgttcgctggcggaaatggcggcgatctaccgcgcgttggcgcaggcacctgaacgagaaaagaccgatgactgggcgctgcctgcctggctcagcacccatccggcgatgcaggaacggctggacgcggtgaatgaggcgatggcgcagcagcaataaaaaagcccccggtgaaaaccgggggctttttcgtgaacgggcgaaattacttcgctttaccctggttcgctacggccgccgcttttgctgcgatctcgtcggcgttacccaggtagtaacgtttggttggcttgaagttctcgtcgaactcatacaccaacggcacgccggttgggatgttcagctcgaggatttcatcttcgctcaggttatccaggtatttcaccagcgcgcgcagggagttgccgtgcgccgcaacgatcacgcgctcgccgctcttgatgcgtggcaggatctcttcgtcccagtaagggataacgcgatcgatggtcagcgccaggctttcggtcagcggcagctcttgctcggtcagcgaagcgtagcgcggatcgtggccagggtaacgttcgtcttctttggtcagctcaggtggggtcaccgcgaagccgcgacgccattgtttcacctgctcgtcgccgtatttttccgcggtttccgctttgttcagaccctgcagcgcgccgtagtgacgttcgttcagcttccaggatttttcggttggcaaccaggcctgatccagctcgtcgaggatgttccacagggtgtggatcgcgcgcttcagtacggaggtgtaagcgaagtcgaaagtgaaaccttcttctttcaacagcttgcctgctgctttcgcttcggtgcggcccttgtcggacagatcaacatcataccaaccggtgaagcggttttcttggttccactggctttcgccgtgacgcaccagaaccagcttagttacagccatagcttaactccttaataatctgacatttcaatgataacgaaaatcattatattgccgcgggccggggctcggcaatcgatagtgtctaaccatagccaatttcttgccgcaaagtaagggctggcgaaaggaaaaagctgaatcgttcaggctgaggcggaagggggagaaacggcacgtcggaatcgctccggacgcgccgtggcgtagggaaaatcaggcagattttttcaggcagttgctcatgaaggttttacgcgcgtcgcccttcagatccttggtcttggcgtcggcattgcagcttttcattttctgctgctgcggcgtcagggttttgccggacgcagcggcgccttcggacttcaggcaggtgctcataaaggtggagcgatcggcgcctttcagcgacttggtggatgcctgctggttgcaatcggtcatgcgtttctgttgggccgcctgcgccggcgaaggcgttttcgtcgccgtcgtcgcgtcggccgccatcagattggtgctcagtattaagcccgccagcaatggaagtgcagtaatcagacgcataggtgttccttcagctattgattggccgccatcggccgaaaattgtgacgttgcacaaggcgttgtgcttatcacggtagcctgagtgtagtgcgcgctttggaataagggaaggtgggcgccggtggggggatggcgctaaaaggtaagcatttataacaaattgcccccggccgcacggcgaggggcgtagcgggtcagataggataaaactgataatgcgtggcgctgcggtagcggctccccggttgcagccaacaatccggctgcggccactcggggtggtgcgggctgtccggcaaaaactcgctctccagcgccacgccggcatggttggcgtagctgccgccatcgcgcgccggcgtgccggccagataattgccgctgtagagctgcagcgcaggcgcgtcggtgaacacgctcatttgcacttgcccgtcggcggaccacaaatgcgccgccgggctctccagcgccccgcaggtacgatgcagcagaaaggcgtgatcgtagccttttacccgctgctggtcgcaatcgcgcaggaaatcctgcagcagcgttttcggctggcggaaatccatgccgctgccgtccaccggcgtcagatcggcgcagggaatgccctcggcgtcaacgggcagatagcgatcggcgaacagctgcagccgttgggcgcgggcgtcggtgccggcgccgtccagattgaaataggcgtggttggtcagattgaccgggcaggggcgatcgacctgcgccagatagttgatttccaggcgattatccgaggtcaggcggtaacaaacctgcacgtcgagattgccggggaaaccctgatcgccctccgccgaatgcagcgcatagcagacctgctgcgcatcatgctgcacccggcgccagcggcgggcatgaaaaccgtcgggaccaccgtgcagctgatgggcgccctgattggcggccagcgcatggggtttcccgtcgatgggcagactggcgttggcgatgcggttggcgtaacggccgacggtggcgcccagataggcgccctgacgtgggtagtccgccgggctgtggcaacccagcaacagctcgcgcttttcaccggatttgagcggcaagacggcggacagccaggtggcgccccagtccatcagcgtcaccgtcatgccgtcggcgttttgcagcagtgtcagctggtaaggttgcccatcgggcgccgcttccgtgctcaccgtcagcatgggccggccccctgcgaagcctggcagacatagaaggtttcctgcaatccgccggtttgccgcggatactcgtgcgccacggcggcacgcactgtctccacgagatcctgtggcatcagcgcgacgatgcagccgccaaagccgccgccggtcatgcgcacgccaccgcgcgggccgatcgtcgctttgacgatctcgaccaaccgatcgatcggtggcacggtgatttcaaagtcatcgcgcatcgaggcgtgggattccgccatcagccgccccatgcgctgcaggtcgccggccgccagcgcgtcggccgccgccagcgtgcgggcgttctcgctgatgacgtgccgcgcgcgtttggccaccaacggatccaactgatgttgacgcgctgcaaactgttcggggctaacgtcgcgcagcgccttgacgccgaagaaccgcgccgcttcttcgcactgtgtgcggcgggtgttgtactcgctgtccaccagcccgcgctgcacattggagttgacgatcaccaccgcgacgttgtccggcatcggcaccgcgcgggtctccagcgagcggcagtcgatcagcagagcgctgtcgcgccggccgagcgcggagatcagctggtccatgatgccgcagttgcagccgacgaactggttctccgcctcctggccgttcagcgccagcgccacgccgtccaacggcagctgatagagcgcctgcagcgcctggcccaccgccacttccagcgcggcggaggagctgagccccgcgccctgcggcacattgccggcaatcaccagatccgcgccgccgaaatcggcgttacggcgctgaaggtgcttcaccacgccgcggacatagtcggaccagcgctgatcgggatggctgacgatcggatcgtcgagcgagaattgatcctgctgattctgataatcggcggccagcacgcggatctggcggtcgtcgcgcttggcgcaggcgatgacggtttggtaatcgatggcgcagggcagcacgaagccgtcgttgtaatcggtatgctcgccgatcaggttcacccgccccggcgcctggatggtcaacgccggcgcgtagccgaagtgttcggtaaacagggaatgggtaagcggtttcaggctcatgcttgggctccggcttcacggtaatgaatatcgctgacggcgcacagacgctctgcggcctgttcggcggtcaggtcgcgctgggtttccgccagcatctcgtaaccgaccataaacttgcgcacgctggctgaacgcagcagcggcggatagaaatgggcgtgcagctgccagtgccggttgtcggcaccgttgaacggcgcgccgtgccatcccatcgaataggggaaggaacactggaacaggttgtcgtagcggctggtcagcttcttcagcgccagcgccagatcgcggctttgcgccgcactgagatcggtaatgcgctgcaccgccgctttcggcaacagcagcgtttcaaacggccaggcggcccagtagggcaccaccgccagccagtgttcggtgttcaccacgatgcgctcgcctgcggccagctcgcgctgcgcataatccagcagcagcggggaggcgtgttcccgaaaatagtcgtgctgcaggcgatcttcgcgttcggcctcgttcggcagaaagctgttggcccagacttgcccgtgcgggtgcgggttggagcagcccatcgccgcgcctttgttttcaaacagctgtacccagggatagtgcttgcccagctcatcggtttgcgcctgccaggcggcgaccacctgttccagcgccggcagcgccagttcgggcagggtcttgctgtgatcgggagagaagcagatcacccggctgacgccgcgcgcgctctggctgcgcatcagcggatcctggctatcgggcgccggtggcgtatcgctcatcagcgcggcgaaatcgttggcgaaaacataggtaccgcgataatccggattgcgatcgccggtgacgcgcgcattgcccgggcacaggaaacagtcgggatcgtgcgccggcagcgtttccgtcgggacggcctcttgttggccctgccaggggcgcttggcgcggtgcggtgaaaccagcacccactggccgctgagcgggttgtagcggcggtgcggatgatcgatagggttaaattccgtcatacggttcctttcttggcgccgacgaaagtgtaatcgcttccaattaccgtcttgagacgcccgttgctgaacagggagaggctattgcgcagaaagatagcacgcccgcggcggtaaaaaggtgatctaacgcgaaaaatggaatcgtttacacttcattgaaaagcgcaggaagggcgaagaaaagcgggcgacaacgtgattgagggcattgcggtgaggtgccggtgatagcgttttcacccgaccagccggcagagagggggctctctgccggcttcagccgttaagaatgctggtacagcggataggtgaagaacagcagatgggtcaggttaagcccgaaatggaacagaatcggcacccacaggcggccgctccacatccacgccaggccgtagatcaccccggcgagggtcgcgaagatcaccatcagcgtaccgcccgccagatgcgcggcgccgaataccaaggaggcgacgatcagcgccggccaagcgcccagccactggctgagacgctgttgcaggtagccgcgaaacagcgcttcttcggccatgcagacgaagaacaggtttgccatcacgaaaggcaggatccaggcgggcgcatgcagctcgatttttaaaccgcccagcgcgacggccagcagcaacagcgccggcacggccagcagcagcgcaatccagcccgttttgccggcgttgccgccgcgttcggcggaaaacagcgtgggcaagcaggcgaacagcaggaagggcaccatcgccttatcgaagttgtaatacatggtgaacggcgcgctgagcgggccggctttttcgccgtcgatcatcagctgattgtggatgcccggcaccaggtgcaagaacagcgccacgcagccggcgaccaccagcccttcgagcgcaatcgccagattgcgttgcgcgcgaaaatggtggcgcagccccgccagtgccacgatggccaacaggcaacccaggctgagcggcgtcaataccccatgataaagccccatgcccgccgaggcggccaggatcacccaggctatcagccggttaaacggcaagaaaaataacgaagcagccagtacgccccacataatatgtccctttaaatatgtacacggcgctcagcgcctttgcggcgtgcgatgatggcgaaattgagcgctagagcggatagtagcacaccaagatgacgctaaaggtcggggcagtgatgcatttgtgcatgatgccgacccacacgaccggcggcgatgagggttagcctttcatccatgcctgcgaacgggtgatttcggccaggttttgcaaggtatcgaggctttgctggtggatctcctgcgtgggggccgcgcacaggtcttgcagcacggtcacctggaaaccggcgtcatgcgcctgacgcgcagtgctctcgatggcgagcggcgtgctgacgcccgccagcagcagatggtggcaccgatgttgccgcagccaggctaacaaattgttaccggagaaagcgctgactgccgttttttcaaactgcagatcggtctcttcctgatgcagttcgggcatccagcggcagcccgggccgtttaaccgcagcgcgccgatctgcttgagatggttgaacaacggcgaatggggcggaatgtcatgataatcgtcggcgaatcccacccgcacccaaatcaccgggatttttcgcacccgggcataggccgcggcggcattgacgttggcgagcaggtgggtcgctgccacctgttcgtggcagtggttggcgcgccctttgggcccgatcagatcttcgatcaggtcgatgataatcaacgcagcggacatggcgtctccagaaatggccttcttcctttctatgataaaaggccaaatgtgatgtgctgcggtgaagtgttgccggatatgtttacgccgcgtttcaggcggaggccgcctccagccgttgctgttggtagccgtagccgccctcgccgtcgggcacgaagctgaggcggtgagtgatgcactgcggcgcatcttcggcatggtgcgagacgaacagcagctgggtagcgccctggccgatcagcacgtcgatgaagcggcgcaccagctggcgattgagcggatccagcccctgcagcggctcgtcgaggatcagcagcgccgggtgtttcaccagcgcgcgggcgatcagcgccagccgctgttggccccaggaaaggctgtggaacggggcgtcaccgcgcgcgccgttgagcccgagcagcgccagccattgctctgtcagctgccgctgacgatccgaaaccgcctgataaatgccgatcgaatcgaaaaaccctgacatcaccacgttgcgcacgctggtgttgacgcgataatccagatgcaggctgctgctgacgtagccgatatggcgtttgatttcccagatggtttccccgctgccgcggcggcggccgaatagcgtcagatcgttgctgtagccctgtggatgatcgccggtgatcaagctgagcaatgtggatttgccggcgccgttcgggccgacgatctgccagtgttcgccgggatttacctgccagtcgaggtgattgaggatcggccgatcgttatagctgaccacgccgtcacgcaggacgatcagcggccgatccgccggcagggctactttttgcgtcggatcctcggtttccggcagcgccagcccgttgagattttcgctgtgcgccagctgcgccaccagcgcgtccgccatcacctggctgcgcggcccgcggctggtcagggtgcagtccgccagcacgcccacccgccggacgaaatccgggatttcgtcgaaccggttgagcaccagcaccacggtttggccctgggcggaaagctcgctcagcaacgcggcgagctgcgcgcgggagtgcacgtccagcccgtcgaagggttcgtcgaggatcagcaggtcgggctcgggcatcagcgcccggcacagcagggtcttgcgcgtttcgccggtggagaggtatttgaagcggcgcgtcagcagggcggtgatgccgaactgtgcggccagccgctcacagcgcgcggcgtctttcacctcttcctgaatgatctcagccgcggtgcggccggtgtcgtcttcgtccgcgctgagcagatcggtgttgttgcgttgccactcgtcgctgaccattttttgcagctgttcgaaggagatgcgcaccgcgtgctgaaagtcgctgcggcgctcgccgccgagcagaaccagttcgtcggccagcgcccgcgccagggcggatttgccgctgccgttggcgccgacgaaggcccagctgtcgccggcctggatttccagcgcgtccagcgtcagggtgcgggtatcgcttaagcggaatgaaccttgcgaaatgtgcaacgacgacatcacctgttcctttttttgcaattatttgccttagaaataggcgcattgcagggggatgtcaatcaacaaaaatgcaacgttacgttgcgcttaacacaacgtggcgacaatcacgtggtcggcgttgaacagggcgtgtacggcggcgccgacgctcagttgcagacgctgcagctccgccgtcgtcagcgtggcgcacagggtttcgccccccgccagcgtcaccagcacctcgctgtgttcggcgcctggctgaatgccggccaccacgcccgccagcgcgttatccgcgccggcatgttccgccgtctcgacgcttaaccgcacccacggcgccttgatcagcgccagcacctctttgcccggcgtcagctgcagccggtcggcgctttgctgggtaatggccgccgtcaggcgagtgctgccgtcgttcaataaaatcgccaggtgctgctgcacctgctgatgatcgcgttcgatgacggtaccgaagaactgattgcgcgcgctggtttgcagcgagaagcgcgagatggccgccagcaggctgtcgagcggcagatcgtcctgctgcaacacgtcgaaggccttttgctgcacctggcccagcaggtcatacagctggatcagccgctggccatagcgcgtcagctgtgcgccgccgccgcctttcccgccggtggcgcggtccaccaccgtttgttccgccagctggttcatctcattgatggcatcccaggcgcttttgtagctgatgcccgccagcttggcgccctggctgatggagccggtgtgctgcacctgtttcagcagcgcgatgcggcgcggatcggcgaacagcttttgctggagtttgagagtcagaagaatttcggcctgcatagcgcatcctgtcggcggcaaaaatcttattgtcgccgatttggcggcaaagcgccaaacgcagtgcgctggagagcggggtaataaagactggtattgttttgttgttataatataacataacagaaaaacgataaggctttacgccggctgcggccggtttttatttcaccacagggatgctccacatgagtacgacacgccggcgctttcgcgcgcccagaaaatctttatgcctggccgccgcctgggtcggtggcgcactgacggcgccgctggctttcgccgccgactgcgataaagcccgcaatgccacgggatgcgaagaacatctcaccgtggaggcggcggcccccgccgggcgctacgatgcgttgaacgccgtgagccgcagcgcgtcacagctcgggctgaccgctcgggagacgccgcgcagcatcgatatcatcagcgcgcgggcgatccaacagcggggcgatcgctcgctggctgccgccgtcgagcgcgccaccggtctgtccggcgtcgcttcgccaacgttgtccaacaacttttccgcgcgcggtttccggccgatcgcctggctgtataacggcgtagaaatgcccggcagcacgctgcagctgggcgatctggcgcattacgacagcatcgagatactgcgcgggccgggatcggcgctgaacggcctgagcgcagcgggcggcagcgtcaacctgatctcgcggcggccgaccttcagccgccagccgttcgagctcgattatggcctcggcagctaccgcagccagcgcttgcatctgggagccggcggcgcgctggtggacgatgcggtggcgtatcggctggacgtcagcggcaacgacagcggcagcaacgtgcaggacgagcgcgatcggcagaagcgggtttccggctcgctgctgtttaagctgaccgacgatgcgctgttgacgctgagcctggaccgcatgctcaaccgcaccaacaacccttactacggcacgccgctgctggatgggcgcattgccggcgagctgcgcgacatcaattacaacaacctgaccgacagccgtattcagagcaacgccaccgcatttcaggccggtctggactggtttatgacgcccgaagtggaatggcataaccaattctattactacagcggctttcgcgaatggcgcaacgtcgagcgtttccgcgtcgcggcggcggcccggcccggcgacgtcaaccgcgactctttcggcgccctggcgcacgacgacgatctgatcggcaaccgcagttcgctggtgttcgatcgcgccattgccggtttcgataaccggttgctggtcggcttcgacctgagcaagcggcattttcagtactactccaacggtttccccggttccgaagacgtgccgctcggcgcgccgcccagagagccgttcgcgcagggcaccgatcgccaacgcgcgccggtgcgccacgtcacccagaatcagtacgccgcctttcttgaagatcgcttcagcctgaccgagcgtttagcgttgctgggccagttgcgctacaaccatatggacatggactggcgcttccaggggccgcaggaagagagccgcgcgcgcacctacgttttcagcacctggagcctgggccccagctatgcattgaccgataacctcacgctctacgccaactacaccaccggccaggagccgggcaacgatctgttcttcctaagcccggcgcagatcgatctgccgctgacgcgagcgcgccagtgggaggccggcgccaaagggcagttttggggtaacaagggcgaggcgacgctggcgctgtacgaactgcgcaaggacaacctgtttgtgcccgacgcgcagcggccggatgcgttgaacgcggtaggcaggcagacgtcgcgcggcatcgagcttggcgtggtgctgcgtcccgacgagcgctgggagctggccggcaacgccgcctacacgcacgcccgctacgacgactatcgcggcggtagcccgctgcgcagctacaacggcaatcgcccggcctatatcccggactggaccgccaacctcagcgtgcattatcaggcgacggaacgtttggggctggcttcttcgctgcgctacgtcggcagcagttacaacgacgatgccaaccggcgcaagatgcgcgcgtacaccacgcttgatctggcggcggactatcagctgacgccgatcgtcgatgtcggtttccgcattcgcaacgccaccaaccagctgtacgcctatcagcgcacctacccggatcaggcgctgattgcgccgccgcgcagctatgaaaccttcgtgtcggtcaggttctgacggcgtgaaacattcgttttactcgctgctgtatgccctgggcttgatgtggggcgtctcgctgcccgccaatgccgtcagcctgcacaattgcggggcaatgcgcgattacccgcagccgccgcagcgggtgctggtctacgccaatccggcgctggaaaacctgctggcgctggggctggccggccgtgcgatcggcgtggtcgggtatgaccgcgcgcgcgatcccgcgccgacggcgccggccgaggcgctgcgggcgcctgccagcccggcgccgcccacggcggaagcgttgctgctgatgcggccggattttgtctattcggccagttattactggctgcacagcccggaaacgcccgatcgggcgcggctggcggaatggggcatcggcacttatctctctcccggcgcctgcagcggccagcaaagcgcgatcgctgccgcgctgacgttcgaagacattttcaccgagctgcgggagctggcgcgtatcttcaacgtcagccgcgccggtgaagcgctgatcgaacggctgcgcgggcagttgaggacgcttgagccgcagcgcgcacagctgccgcattggcggctgctgtggtggtatgccggcgcgcagacgccctatgtggccggctgctgcggcgcgccaggcttgctgagccgcagcgttggcagcgagaacctgttcggcgatctgcccgagctgtggccgacggtatcctgggaggttattgccgcccgcgatccggatgcgatcgtgcttggcgatctgccgcgcggcggcttcggggacagcgcggccgacaagatcgcctttctggagcatcacccgctgaccgcgacgctgcgcgccgtgcgtcagcggcgctacgtgatcctccccggttacgacatggacccttccgcccgcaccgtggcggcgctgggccgtttgattcggggcctggcggccttgtcgccgcaggctccgacgctttccaacaaggaaccttgatatgactgccgtttcattctcttcgctgctggactcctgggatcgccagcaggcggcctacatcgccgaacgcgaagcgcgttttaacgcccagctggacgtgctggcgctggccgtcggccaggattttcacgtgctggatctggcctgtggcccgggatcgctgagcctgcgtattttgcagcgctttccgcaggccagggtgaccgccatcgatctcgatccgctgctgctggcggtggcgcgcggcgcgctggcggagtatggcgatcggatccgtatcctgcaggccgatctggcggatccggcctgtttttccgtgctgtccggccctacgccgcaggcggcggtgtccagcacggcgctgcactggctgatgccggagcagcagctggcattgtaccgtaacgtcgccgggctgctggccgccggcggcgtattcctcaatgccgatcatcagcgctgtgatcaccgtcagccgaggttgaaagcgttggcggagcggcacgacgagcagactcaacagcgcgcctgggacagcggagttgaggattgggatcgttggttcgccggcgcgctgcaatcgccggacttggctgcttatcaggccgagcgcgaagcgctgttcgccggccgcccggtaccgccgccgacgccggtggatttccagctcgcggccctcagacaagccggtttcagcgaggcggggacggtatggcagctgttggacgactatgtgattgcaggctggaaatagcatgagccggcggttactgcccggccgtgagggcggctggttgttgctgctggcggcggcgctgccgctggccctgctgggcgccaccttgtcggggcccgcgccgatcgcgtggcgcgacgcctggcgcattgtactcggcgtcagcggcggcgcagcgtccgatgccgaggtgtatcagcgcatcatctggtcgctgcggatgccgcgcgcgctgttggcggcgctggccggcgccgggctggcgttggcgggcaccgtgctgcagtcgctgacccgcaacccgctggccgatccctgggtgctggggatctcctccggcgccggcgtgggggcggtgacggtgttggtgttggggctggggggcggcctgctgtcggtgtccggcggggcgtttatcggcgcgctggcggcgtttgcgttggtgatgctgctggccgggcgttcgctgcagggggagtccacgctgtttattctggccggggtggcggtgacgcagctgctctccgcgctgacttcgctgatcaccctctggcaggcggacgccaacgccacgcgcggcgtgatgttctggctgctgggatcgttcagcgacgcgcgctggccgcaggtcgggctgtgcgggctggcgctggcggcggtgctgctgctttgttggctgcgggcgggcgaactggacgcgctggcgtttggcggcgtgaccgccgcttcgctgggggtggcggtggccccgctgaagctgctgctgtatgtggcgaccaccgcgctgacggcggcgatcgtcgcgttcagcggcgcggtggggtttatcgggctgacggtgccgcacgtcgcccggcggctggtcggttcgcggcatcggctgctgttgccggccagcgcgctgtgcggcgccctgttcgccgtggcggcggacacgctggccagaacgctgtttgccccgcgcgagctgccggtcggggtgctgaccgcactgctgggggtgccggtattcctgctgttgctgtatcggaaggtcaatgcatgacgattgaaaaagcgcgatccggcctgtgcgccgaggcggtgagctggcgagcgggcgcacgcacggtgctggaaaatctcagtttctgcgccttgcccggtgaggtcaccggcgtgctcggcgtcaacggcagcggtaaatccacgctgctcaagctgctggccgggctgcagcccgccgccgggggccgcgtttggctggaagggcgcgaaattaccgcgttttccgggcgggagcgcgccaggcgcatcgcctttctcgagcaatccgcccccggcgccttcgcgctgccggtgaaggaggcggtgctgctggggcgcctggcccataccggccgctggcgcggtttcggcgccgaggatcgccgcctcgccgggcaggcgatggagcaagtgggcatcagccacctggccgatcgcgattggcagcggctgtccggcggcgaacggcagcgggtgcatctggcgcgcgcgctggcgcagcaaacgccgtggctgctgctggacgagcccgccaatcatctggatatcgcccatcaacagcagtttatggccttgctgcggcggctgaaactcagcgtggtggtgacgctgcacgatcttaatctggcggcctgttattgcgatcggatcgcgctgctgcagcggggcgggatctgtgcggcgggcgcgccgcggcaggcgctgacgccggagaacattcgcgcggtatacggtgtggaggccaggctggcggcgcccgccggctatgcgccgccgttgatctattaccccgcgccgggatgagggcggctgaaagggcacatttggccgatcacaatttcgcctcgctggctaaaataactccgttttatcgatttttttgggttagaataaccggatatgcggtgaaaggtatttgccgctcaatgggcagttaagcgaggctatcatgttggaattattgaaaagtctgttgttcgccgtggtgatggtgccggtggtgatggcgctcattctcggcctgatctacggttttggcgaagtgttcaacgtcttctccaaagtgggccgttcgaaagaaaaccgcacccagcactgaccgttccccatcccgatacccgccggcattccccggcgggcattcctcaagttatctcacgctttgccgataaaccgcatgacaagctttcgcgcaacgttatattattttttatataacgaagagtgataatgcacgttaacttgcggagaaaaacaatgaaacagcaatggaccaaatgggttggcgggatcgttctggcatcgggcctggtggctcaggcttcggcggcggaaaagatcaccgtgttcgctgccgcgtcgctgaccaacgcgctgcaggacatcgccacccaatatcaaaaaggcaaggacgtgcaggtggtttcctcctttgcgtcgtcctcgacgctggcgcgccaaattgagcagggcgctccggccgatctgtttatctccgccgatcagcagtggatggattacgccatcgacaagcagcagatggtgaaagacacccgttacacgctgctgggcaacgaactggtgctgatcgccgccaagagcgataagcaagacaagatcgccatcgacaagcagaccgactgggccaagctgctcaacggcggccgcctggcggtgggcgatccggatcatgtgccggccggcatctacgctaaggaagcgctggaacacctgggcgcctggagcgcattggagccgaaactggcacgcgccaacaatgtgcgcagcgccatggcgctggtggagcgcggtgaagcgccgctcggcatcgtctacggctccgacgcggtcgccagcgacaaggtgaaagtggtgggcgtgttcccggaagacagccacaaaccggttgaatatccgatggcgatggtgaaagatcgtcaaaatccgacggtcagcgctttctatacctatctgaagagcccggaagcggccgctattttcgaacattatggattcaccccgcgtaaatgattctgagtgagtacgagtggcaggcggttgagctgagcctgaaagtctccggtttggcggtggtctgcagcctgccgttcggcattctgatggcctgggtgctggtgcgttgccgcttccccggcaaggcgctgctggacggcgtcattcacctgccgctggtgctgccgccggtggtggtcggctatttgctgctgatcgccatggggcggcgcggcgttatcggcgagtggctgtacgactggtttggtttcagcttcagtttcagctggcgcggcgccgcgctggcatcggcggtggtggcgtttccgctgatggtgcgcgccatccggctggcgctggaggcggtggatacccggctggagcaggcggcgcgcacgctgggcgccaatccgtggcgggtgtttttcaccatcacgctgccgctgtcgctgcccggcgtcattgtcggtgtggtgctggccttcgcccgttcgctgggggagtttggcgccaccatcaccttcgtctccaacattcccggtgaaacccgcaccattccgctggcgatgtatacgctgattgaaacgccgggggcggaggccgccgccgcgcgtctgtgcgtgatcgccatcgtgctgtcgctggcttcgctgatggtgtccgaatggctggcccgctggggccgcaaacggatgggggtgtaaatgctggagctggatttctcgcagcagctgggcgacctcaatctcaacgtccgcgccgatttgccggcgcagggcatcaccgcgattttcggcctgtccggcgcaggtaaaacttcattgatcaacgccatcggcggcctgacccgtttgcagcaggggcgcatcgcgctcaatggccgcacgctggtggataccgccgcgggcctctgcctgccgccggaaaagcgccgtatcggctatgtgtttcaggatgcgcggctgttcccgcactatcgggtgcgcggcaacctgcaatacggcatggcggccggcatgcgcgcgcagttcaacaccatcgtcgagctgctgggcatcgggccgctgcttaatcggctgccgctgacgctctccggcggtgaaaaacagcgggtggcgatcggccgcgcgctgctgacggcgccggaactgctgctgatggacgaaccgctggcctcgctcgatctgccgcgcaaacgcgagctgctgccgtatctggagcggttggcgcaggacgtgaacattcccatcctctatgtcagccatagcctggacgagatcctgcggctggccgagcaggtgttggtgctggatcgcggtgaggtgcgtgcgttcggcgggctggaagaagtctgggccagcagcgcgctgcggccgtggctgcagcgtgaagatcagagcagcgtgctgcgcgtcagcgtgattgagcatcatcaacgttatgccatgaccgcgctggcgcttggcgatcaaaggctgtgggtcagcggcctcgacgccgaactgggcacccagctgcgcattcgcatcaacgccgccgacgtctcgctggtgctgcagccgccggtcaacagcagtattcgcaacgtcttgccggccaaggtgagcgagtgtctggacgtggacgggcaggtggaagtgaagctggcggtcggggaacacgtgctgtgggcgcgcatcacgccctgggcgcgcgatgaactggcgatccgccccgggcagtggctgtatgcgcaggtgaagagcgtgtctatcagccgcgagagccgctaagacaggccctcccggcgggagggcgaaaagattacagcacgcgggtgcggatcacctcggcgatgcccggctgcaggttatcggcgatcaccagatcggcgcgttccttgatggcgtcatcggcattgcccatcgccacgcccaacccgaccgcttccagcatgctgatgtcgttgtagttgtcgccgaacgccaccacctgatccatgctcagcccctgcgactctacccattgacgcaggcgtttgcctttgctgttgccgcctttggcgatatccacctgatcgtgccaggaccattcgcacgccagccccagctctttctccaccgtgtcggcaaactcgcgcagcgcggggatatcggcatgcgaggtggcgaatttccagatcgcctgcgcgtcgtcggccgcctgcgtcaggctgccgacctgcagcagcgtcgggcgctgcgccgccggcagggtttcggcccaggccagcgagcgaatcacatggccgctcggttcctgatacagcatggcgtcgtcaacgtacatcagcccgtgaatgtcggtctgtttgagcatctgcagcacctgtttggcctgctccttcgccaagggatcggcggccagcacctttttctgctgaaaatcatacaggtaggtgccgttacagcagatggccggggtatctatctgcagcgcctggtaaaacggatggatggcgacgtggtggcggccggtgaccaccaccacctggacgccggcggcgcgcgcctgcgccagcgcttccagcgactgcggtaagatgcgtttttggttgtccaacagggtgccgtcaagatcgagggcgatgacgcggtagctcatagggttctcgttatcgttagccataaaattaatccgatggtacctcttcgctctgatgcaaacaattcggcctgcctgctatcgccgaccgatgacttatttggacgctgatgagaacagagttttgaacatcggtaccagaagtttgttgccatattcgctaagatggttatcgtcaaaatagatgggccgcccattgtgagttcccgcgcacttgccgtctcggcagaggtaaggaagcggatccaaaatttttacgccacattttttcgccgcttcatcttgagcttgccagacaaaagcatgacgttgtcggtaatctgtttcggagatggatatgtcgggctctgaaccgccaaaactcagcaggcgcgacagtgtttttggcacattgacgagcatttccggcaccggacgcacaacataaatttgccgttctgtagccatttcacacagagtgtcgacgagtgaagttttgaactcggacaaaaatcccggctcaggggtacgatataccttcgaaaaatacaccgagggttggttcagcttcgcgcccgcaatttgctggccgaaggcgtaagcactggttcggttaatcacgactgcggggatattgttgtccagcgtggatagtttttcttttatccactgattgaatgcgctgcactgaatattatcgtcaagcgcgccgggaacaacgttggcaccgaagagcgttgggcagcctgcataagtgagattgagaagcccatcagtttgatttggcagggcggactcgactgcagagatcatcgcatcgccgtggctatcgccaacgatgataacccgaatattttcgcctccatagatacaggatggcgagctgatgccggacttggcgaagcattcatctctgttggcgagcatgttggtactttcgttggcgatcagatcgatttgctgcggtaacctgccggagaaattaacggtaaacagtgtgacacacagcgcagcaaccagcatggtagcgattccgattgtacacactgattgacgcgttgtttgccttgaaagccacttgcgggcagggttttctataagacgaagcgacaactcgccaagcaacacgctggccagtaatcccgcaactacccatttcatctcggattgagcattggtgtagacaagcagcaccgcaatcggccaatgccaaaggtaaatagagtaggatgaaacacccagacgtgcagcgacggggtttgaggtcaagggggaatcctggcggccggcggcaagcaccaacatggcgccgataaccggcaacagggcgttataaccgggccagggtttactggcatcacatcccacgatggctatcgcgatgcatagcatcccaagccattccgtataaatacgtctttttccgctgagcgttcggttttgcgttaaccgccagacgattcctccggcaagcatttcccaggctcgggttgggataagaaaaaacccggcggagggcgcgagggaagacatgatgattgataagccaaaggagaccacgccggctaaaatgatgaagcgcatgaagccgtttttgccccccaatcgccatatcaacataagggccagcggcaggataatatagaactgccattctacggataacgaccaagtatgcagcagccatttttcatgggatgcgctgtcaaaatagccggcctctttccaaaacttcacgttagataggaagagtatggcggtaaaggcgtgttttgccagttgaacataatctggcgtcggcaaccaaaaccagcccagacacagcaaggtcagacaaagcgccagcagggcgggaatgatgcgtctggccctggcaaggtaaaattgccaaagtgaaaagcggccttcctccaggccggtcacgatgatgcgtgtcatcagaaaaccggatatgacgaagaaaatatccacgccaacaaaaccgccggcaaaacccgggatgccgaaatgaaaaagtacgacggcgattactgcccaggctctaagcccgttgatgtcatgtctgaaactctgtgaaaaagaaaacatatctattactcattaaatgtatttttgggttttttaataggcacccataaagtaaaggcgtgcgggcacgctttcccatggtgttattgcaatcgcgattgacgtgtttttttattaatccttcttaattatttttcatgtgtatttatgtatgcggccaaattcattcattaagagaattattaaaggaacatgccatgggtgtaggtggtatgccaaacccgacatggctgttatgtccagtgagacataggcgtgtctgtaccgactgtggacggcaatatgctatatatcgattaattaatgtttgttattttcttaattttatctatgcgtattaattatgataatcgctttggttatttagattaattatgtttttttaatgacgccaggtggttatgtatattgctaatgtaaaggtgactaaccgtgcggcggcaaattctattttaaattttgagcaggccttttaatttatcaataattcgtgagtctgtcttccattctctatgactgctcgtttccgataagaaaatcgcagcagacgctaggatgatggcttttggcattttgaacgtagatgttgtctgggggggaaagtatgtggcttggggatttaagcgtaatgcggtagtgccatgtgacggatgtgcggtaagctaggggcaagcgaacggcctgaaaccggttcctcttttaccctttgcaaggagaacacatgaagcaaatcgtttatgtcgccagcccggagagccagcagatccacgtctggcagttggacgacgccggcgcgctggcgctgctgcaaaccgttgacgtgccgggccaggtgcagccgatgacccttcatccggacaagactcacctgtacgtcggcgtgcgtccggcgttcggtatcgtcagctaccgcatcgaggcggatggcacgttgcagcaggccggcatggcgccgctgccgggcagcccgacccatatctcgaccgatttgcaggggcgttacctgttctccgcctcctacagcggcaactgcgccagcatcagcccgatcggccacgacggcgtggtcacggcgccgatccaacagatcgacggcctgaacgcgccgcactcggcgaacatcgatccgaccaaccagctggtgctggtgccgtgtctgaaagaagaccgcatccgtctgtttaacctgagcctggcgggccagctgacgccgcacgcgcaggacgcggtggatatcgccgccggcgccggcccgcgccatatggcgttccaccacaacgacaagttcgcctactgcgtcaatgagctgaacggcacggtagacgtgctggccatttcggaaaacggcggcaagtacagcgtgacgcaaacgctggacatcatgccgagcgatttcgacggcacccgctgggcggcggacattcatatcacgccgaacggccgcttcctgtataccagcgatcgcaccgccagcattctgaccctcttcagcgtttccgaagacggcggcacgctgagcgtggccggctattatccgaccgaaacgcagccgcgcggtttcaatatcgatcacagcggccgcttcgtgatttcgtccggccagaagtccgatcacatcgcggtgcatgaaattgaccagagcagcggcgagctgaccatgctggcgcgttatccggtgggcaagggcccgatgtgggtgagcgtgctggcgaagtaattcgtcagccagactcgagtggaaagcgcggtgcggttgaccgcgcttttttattggcgggggatcagttgaacatcaccgtcagcgtggcgctgccgagactgtggaaatggacgttgaagcccaccagcgcgccgctggaaccctcatccacgtcaatgcgctccacgtccaacgcatgcacggtgaactgatagcggtggctttcgccattcggcggcgcggcgccgccgtaaccggccgagccgaagtcggtgcgggtttgcagcgcggcgctcggcagcggcgctttgccggagcctgcgccctgcggcagctcacgcacgtcggccggaatattggccaccacccagtgccaccatccggagccggtaggggcatcgggatcgtacagggtgacgacgaagctcttggtgccctcgggcacgccgtcccaggccaggtggggcgacaggttatcgccgtggtagcccatgccgttgaagacctgcgtctgcggcattgtgccgccgtcctgcagatcgttgctgtacaaacgaaaagccataatgactcccagttgcgataaaagcagagcccttaagctagatctttttggtggaacaatacaaccccttgcgccagcggcgggcggttgatctcgacggtaacatgcaccagttcgggatgaactgccaacagttggcgcacccggtcggcggtgagggcgcgatcggcgctgctcagggcgaggacgcaatgatattttcctttaccgatgcggcccaaatgcaaatcggtcagcgtgagtgggtggccggaggtggccagggtctgacgtatctcttgcgccacgggggcgtccatttcggcatccagcaaaatcttcccgctatcgcgcatcaggctataggcccaggtggccaccatcatcgcgccgacgatgcccatcaacggatcgagccaggcggcgccccaaagcttgccgccgaacagcgcgacgagggccaacaccgaggtggcggcgtcggcgatgacgtggatataggcggagcgcaggttgaggtcatgatgatggtcatcgtggtgatcctcgtggtggtgatggtggccgccgccgcgcaacagccaggcgcaaagcagattgacggccagcccgatcgtaccgatggcgatggcttcgttgtaatgaatcgggctgggattcagcagccgctgcgctgactgaaacagcatcagcgctgccaccagcaccaacaacaccgcgctggtgtaaccggccagcacttctatcttccaggtgccgaggctgaagcggcgatccttggccaaccggcgtgcggcgccgtaagccagcagcgacaagcccagagccagcgcatgcgagctcatgtgccagccgtcggccaacaatgccatcgagttaaacaaccagcccccggctatctcgatgaccatcatactggcggtgagtatcaccgcccatctggtgtttctttcggccaatgggttaccatcgtcaaaaacgtggctgtgctcgcggtgcaaagcgggcgcgtgagacgtcatggtgaagttcctcagcaaaaggtagtgtgctgaaatatactataccccagtatagtaaataacaatcaggcggaaataatgagccataccctcagagatcaaaagaagttgttggcgcgggtgcgccgcattaaagggcaggccgaagcgctggagcgcgcgctggagagcggcggcgaatgttctgctgtgctgcagcagatcgcggcggtgcgcggcgcggtcaacggtttaatggcgcaggtgctggaagggcatgtgcgcgaacatctggctgccgcagacgctacgccgcagcagcgcgagcaggacatcgagcaattgatgaccgttttacgttcttatatgaagtaatcatgatttcactgaaaaaacgcacgccgtggttcggctggctgcgccgttgggccaaaggcatcaagcgcgatatctacgcgctgtggctggccgcccgtgataagcgcaccccgtggtacgccaagctgatcgcgttgctggtggccggctatgcgatctcgccaatcgatttgatcccggatttcattccagtgctgggctatctggacgatgtgattatcgtgccgttgggcatcatgctggcggtgcgcctgatccccaaaccgctgatggccgagctgcgcgagaaggcgcaacagcgcgtcgacaaccccaccggccgcatggcggcggcgatgatcattttactctggctgctgtgtctgggattgctggcccgctatctggaccagcattggtaaggcattaacgcgcggcggcggccacggcggcggtcaggcggctgagctgttccgcttcgatgatgtaaggcggcatcaggtaaatcagtttgccgaacggccggatccacaccccgcgctcgacgaacccgcgctgcagctcggcgacatccaccggttcgcgcatctccaccaccccaatagcccccagcacccgcacgtccgccaccttcggcagcgccgccaacggcagcagttcttgcttcagctgggcttcgatggcgctcacctgcgcctgccagcgattttccgccagcagcgccaggctggcgtccgctaccgcgcaggccagcgggttgcccataaaggtcggcccgtgcataaagcagccggccgcgccgttgctgatggtctccgccacgtggcgggtggtcagggtggcggacagggtcatgtaaccgccggtcagcgccttgcccagacagagaatgtccggcaccacctgcgcgtgttcgcaggcgaacagcttgccggtgcggccgaagccggtggcgatctcgtcggcgatcagcagcacctgatgacgatcgcacagctcgcgcacccgcttgaggtaggttgggtggtagatgcgcatgccgccggcgccttgcaccaccggttccaggatcaccgccgccacttcaccggcgtgctgctccagcagcgcggcgaacggcgcaatgtcttcttcgcgccatttctcgtcgaagcggcactgcggcgcggtggcgaacagatgcggcgccagatagccctgatagaggctgtgcatcgagttgtccggatcgcagaccgacatcgcgccgaaggtatcgccgtgatagccatggcgcagcgtcaggatgcgctgccggcgctcgccgcgcgcctgccagtactgcagcgccatcttcagcgacacttccaccgccaccgaaccggaatctgctaggaacacgcactgcagcgcttccggcgtcatctccaccagccgacggcacagcgagatggcggccggatgggtgatgccgccgaacatcacgtgcgacatcttctccaactgctggctggcggcctgattcagactcggatggttgtaaccgtggatcgccgcccaccaggaggacatgccgtccaccaggcgccggccatccgccagctgcagctcgacgccgctggccgactcgatcgggtaacagggtaacgggcggctcatggaggtataggggtgccagatatgacgttggtcaaacgccaggtcggaagcggtgacagacatacttgtaaaccaaattgaattaagattggttgacagtatatccacaatatttaaactggcgacactttttcgttttggagacgccatgatggccgaccgcattcactggacagtagggcaagcccaggccctgtttgataaaccgctgctggaactgctgttcgaagcgcaaaccgtacaccgtcagcacttcgacccgcgtcaggtgcaggtcagcacgctgctctcgatcaagaccggcgcttgcccggaagactgcaaatactgcccgcaaagctcgcgctacaagaccggcctggagtcggagcggttgatgcaggtcgagcaggtgctggaatcggcgcgcaaggccaaggcgaacggctcgacccgtttttgcatgggcgcggcgtggaagaacccgcacgagcgcgatatgccttatctgcagcagatggtgcagggcgtgaaagcgatgggcatggaaacctgcatgacgctgggcacattggatggcacccaggccgagcggctggcggaggccgggctggattactacaaccataacctcgacacctcgccggagttctacggcaacatcatcaccacccgcagctaccaggaacgtttagatacgctcgacaaggtgcgcgacgccggcatcaaagtgtgctccggcggcatcgtcgggctgggtgaaacggtgcgcgaccgcgccgggctgctggtgcagctagccaatctgccgaaaccgccggagagcgtgccgatcaacatgttggtgaaggtgaaaggcacgccgctggcggataacgatgacgtcgatccgttcgatttcatccgtactatcgcggtggcgcgcatcatgatgccgtcttcttatgttcgcctctccgccggccgtgaacagatgaacgaacagacgcaggcgatgtgcttcatggccggcgccaactccatcttctacggctgcaagctgctgaccacgccgaatccggaagaagacaaagacctgcagctgttccgcaagctggggctcaacccgcagcagaccgcaaccgaacacggcgacaaccagcaacagcaggtgctggccaagcaactgctgaacgccgataccgccgagttttacaacgcggcgccgtgatgagctggccacaacgcatcgagcaggcgctggcggaacggcgcctcaacgccgcctaccgtcgccgacaggccaccgagggcggcaacggccgccagatccggcttggcgatcgtctctacctgaacttctccggtaacgactacctggggctgagccaggatgcgcgggtgatcgccgcctggcagcagggcgcgcagcgttacggcgtcggcagcggcggttcgggccacgtcaccggctttagcgcggcgcatcaggcgctggaagagcaactggcgacgtggctcggctatccgcgcgcgctgctgttcatctccggttacgccgccaaccaggcggtgctggcggcgttgatgcagaagggcgatcgcattttggccgatcgcctcagccatgcctcgctgctggaggcggcggctcagtcgccggccgagctgcgccgcttccagcacaatcagccgcaggcgctggcggatctgctggccaaaccctgcgacgggcagcggctggcggtgaccgaaggggtgttcagcatggacggcgacggcgcaccgttggcggagctgcatcgcctaacccgcgcggcgggcgcctggctgatggtggacgatgcccacggcgtcggcgtgcgcggcgagcaaggccgcggcagctgctggcagcagggcgtgcgtcctgaactgctggtggcgaccttcggcaaggcgttcggcgtcagcggcgcggcagtgctgtgcgatgaggcgaccgccgagtatctgctgcagttcgctcgccatctgatctacagcaccgcgatgccgccggcgcaggcctgcgcactgcaggcggcgctggcctgcattcgagagggcgatgaactgcgcgcccggctgcaggacaacatccggcgtttccgccagggcgcggcgccgctggcgcttaccctgacggattccgacaccgccatccagccgctgctggtgggggacaatcagcgtgcgctcgatctggcgacccgtctgcgcgatcgcggcctgtgggtgagcgccatccgtccgccgacggtaccgccgggcggcgcgcggctgcgcattaccctgacggcggcgcaccagccgcaggatatcgatcgcctgctggaggtattgcatgacgtcagccaatgacacagtgaacaaacaggcggtcgcctcggccttcagccgcgcggccggcagctacgacgccgccgccgcgctgcagcgtgacgttggcgagcgcttactggggatggggagttcccacccgggcgaacggctgctggatgccggctgcggcaccggctatttcagccgtctgtggcgtgagcgaggcaagcaggtgacggcgctcgatctggcgccggggatgttggcattcgcccgtcagcaacaggcggcgcaccattatctgctgggcgatatcgagcaggtgccgttgcccgacgcggcgatggacatctgtttcagcagcctggtggtgcagtggtgcagcgatctgcccgccgcgctggcagagctgtatcgcgtcacccggcccggcggcgtgatcctgttctccacgctggcggcgggctcgctgcaggaattgggggacgcctggcaacaggtggacggcgaacgtcacgtgaacgccttcctgccgctggcgcagatccgcgccgcctgtgccgactatcgacacgagctggtgacggagctgcgcaccctgaattacccggacgtgatgacgctgatgcgttcgctcaagggcatcggggcgacgcatctgcaccagggacgcgagggcggcctgatgtcacgcggccgcctcgccgcgctgcaggcggcttacccgtgccggcaggggcagttcccgctcagctatcatctggcttatggagtgatttatcgtgattaaacgttggttcgtgaccggcaccgacaccgaggtcgggaaaactgtcgccagcagcgccttgctgcaggccgccaatctggcgggctaccgcagcgccggctataagccggtggcttccggcagcgagatgaccgccgaggggctgcgcaacggcgacgcgctggcgctgcaagccaacagcggcgtggcgctggggtacgacgaagtgaacccttacgtttttgccgaaccgacttcgccgcatatcgttagcgccgatgaaggccggccgatcgacgcagcgcggctgtccgacggcctgcgccggctggaacagcgcgccgactgggtattggtcgagggcgccggcgggtggtttactccgctgtcggcgcagtacaccttcgccgactgggtgcagcaggagcaactgccggtgatcctggtggtgggtatcaagctgggctgcatcaaccacgcggtgctgacggcccaggcggtgcaacaggcggggctgacgctggccggttggatcgccaacgacgtggcgctgccggggcggcggcatcaggaatacctggccacgctgcgccgcatgctgccggcgccgctgctgggcgaaatcccgcacctgccgcaggccgaacgagcgccgttggggcaatatctggatatcagcctgctggcgcagtgagaggttctggctgatgaatcataacgccgggtcttatgacccggcgttggcttttacatggcggtaatacaggcgttatcgagataaagcacgccatttttcgccagggcaaacaggttgaacgtcaggatgacatgggtcgcccagaccgggacttttcgtcgattggcgttgaaacgatattcggtgtactcggcgtaagcatcggctttcaaggcggcgtcccaggctgccggcgcggctttggctacgagcgagacgccgttgtccgcatgttcctggatacaggcatattgcagcgtcgcgaacagattgccggtaccgccgttgaccgttttcagggtaaaacaggcgcccaactgctcatattgcgcggcgggcacgatcactctcacccctgcgttggtattggcgttgcccaacttggtcactttcagggcattactgccgttgacgcccgcgccggcttcgatactgatagtcactgcgtctgaggtaaagggctcgctgatcgtgccgcctgttacttcccagccaaacggcttagcggaaaaggcgaactcaccgtcttttaacttgttattcacggcgccgaccagcgtctggatcccggcgccacccccaccgccatccagtcggctattgacgatgacaaagtcgccggtaccgctgaaatagcggccgctggcggttcttacgccatagaacttcacgctgtcgacgataatcccgctactgccggcctcggcgtaaaacagcgacgcttgcgccagtcggccgccggcgacgatgatttcgccgccgtgaatcaacagcgatgcattttgattggcgctgcaacggaagggaatttccgtaagcggactattaccgttgttgaattccatatggcagccatgcaattcaatgctaccggcctcaacgtcggcgatcgagccggcatagtcgatcgaagtgccgaacaggcggaaggcgccgttggggttagcgttgcgaacggccaacccctgggaattgccgagggtgccaccgaagaagttgatgccttcgccgaagttttgggcgccgctgttcgttgaaggcatatgcaggcactcaaaacagcgaatgacttcacaggcgtagtggtgggcgatataggcattggtgccgtagtacaggccgtagtagaagccggaaatatagacgttattgacggaaaagttgcccagcgggccttcaggcgaatcgaaacggacgccgtcgatataggtgtattcgatcgtcgtttcatctttgctgttgttaatcttggcgccgatgccctttacggtgaaatctttcatgataggtgccgggcgaataggaacgttgttatccagcgcgccgctgctggtatagcagcgcaggaaatagttatggtcgctttccgtgccgttggggatctcggtagtgatgttgacgccgttgccgtcgatatagacgaacccgacattgatatcggttttaggcgccgaccaaagggcaaaaggcgcggcgaatctgacaatcgcaggacgttttaacgttttgatgataaagtcttgtgcgccgaccagttcgtcgcgcgaactgacgtaaatgccttcaatattaagacgttcctgcagattccagtttttgttgcgcaaatccgcgtattgaataaatgccgcgttgttgtctgtcatgcttacatccctcgatattatggtgtcggtgtgacccctatcgagtatgaaaagacggcgggcccgtgcctattgggcgcagaccggccgtggctgatacaacagcaacctaatcgctaacccgaccactcactccgccagcccggcgccgatcagcgcctcatccaactgcgtcagcgcgccgtgcgccacagtgcgcccgctatcgagcagacaaaagcggtccgccacccggcgcacgaacggcaactgatgctctaccagcaaaatggtcatgcccaattcatagttgagcctgcggatcacgttgccgatgtcggcggcgatcgaaggcggcacgcccgccgtgggttcgtcgaggatcagcagcgccggttcctgcgccaacgcacggccgatggccaactggcgttgggcgccttcgcacagatcgccggcgcggcgggtacgcatctggcgcaaattgggaaacaggctgtagatcagcggcggaatgcggcgaggggcgccgcgcacggccatctgcgccacctgcagattctcttccacgctcagctgcgagaagagttgccgcccttgcgggacgtggctgatgccgagtgcggcgcggcgctccatcggttgcagcagcaggttttgcggcggctgatctgccggctgccaggtcatgctgccgctcactaccggcaaatgccccatgatgcagttgaccagcgtggtcttgcccacgccgttgcgcccgagcagcacggtgcactggccgcgcggcagctccaggttgatgtcccacagggtgtggttttgaccgtagaattgattgaccgatctcaggctcagcatttggcattctcctcatagacgctcgtttcactcgttggcgggggacagcaaaggccgcatgcgcggcgaatttcccgagtgtggcaatgtctggaacaagatgccgtccgtccgatgagccagagcaaggtctacggtggacggaatgacagtcaatatgttgttaaaaacgacgcttgtgacgacttggtgtcgttcttgcgcttttacaggcgatcgcaccgcgaggggtacacgctgtggctggcagcgcatcacgccgccgcaccgcattgatacgcaggaagataaagcaactctcaggccagttttaccgccgggtgaaaacggggattgttatcgccttgttaaccgctaatcaggcctgacgcgctctgccgcggcggcctgaaaatacgcggggaagttaacccggacgttttttgcactcttgtggtgctctgcggtgagggcgtggtgcaaggcattgcgccgccgtcaagcgcgatccgcgagaaaggggccgatgcgattttggcaatggggatttttagtattaatcggcataaacaaagcgatatttttatgaaaaaataactaaaaaagccattttggcgagtgtaaagggcgaaaagctttctttctgtaactcccgccccgggcggggcggtgagagttatccactattcctgtggataaccttgtgcattagatttagaaaaacgctgtaaagcgagagccgacgcgggttctgttcgctttgcccgcattctcgtctttttattaaatatcttatatatcaatagattaattaaaatcaagacacaggggtattgatcaggtctctatgtatgatttttcgacgcggtgctatcaataagttaattcgcggcaagttctggggataaatctgttattgacaataaaaatgtcacccggctgtaacctcacggtgcaacggcatcgccgccgtgccgggcgcagcgacgaatccgcttgaagctggttttatatccagtatcatgggcactggcgcaaatcgccgacactttccataattaggggccatgtccggcgcagagccggctggccgcctgagcgcgcgcatctccacagggtagccgagcaatgagtaaacttttcaaactgcattccgagttcaaaccggccggcgatcagccggaagccatccgcaagctggaagaggggctggaagacggcctggcgcaccagacgctgctgggggtcaccggttcgggcaagacattcaccatcgccaacgtgatagccgatctgaatcggccgaccatggtgctggcgccgaacaagacgctggcggcgcagctgtacggcgagatgaaagcgtttttccctgagaatgcggtggaatacttcgtctcctactacgactactaccagccggaagcctacgtgcccagctccgacaccttcattgaaaaagacgcttcggtgaacgagcacatcgagcagatgcgtctttccgccaccaaggcgttgctggagcggcgcgacgtggtggtggtggcgtcggtgtcggcgatctacggtctgggcgatccggatctttacctgaagatgatgctgcacctgacccaggggatgatcatcgatcagcgctccattttgcgccgcctggcggagctgcagtattcccgcaacgatcaggctttccagcgcgccaccttccgcgtgcgcggcgaggtgatcgacatcttcccggcggaatcggacgagctggcgctgcgcgtcgagctgttcgacgaagaagtggaacggctgtcgctgttcgatccgctgaccgggcagattgagcaggtggtgccgcgttttaccatttacccgaagtcgcactacgtgacgccgcgcgagcggatcatgcaggcgatggaagagatcaaggtcgatctggcggaccgccgcaaggtgctgctggccaacaacaagctgctggaagagcaacgcctgacgcagcgcacccagttcgatctggagatgatgaacgagctgggctactgctcgggcatcgaaaactactcgcgctacctttccgggcgtgccgagggcgagccgccgccgacgctgttcgactacctgccggcggacggcctgctggtggtcgacgaatcccacgtcaccattccgcagatcggcgcgatgttcaaaggcgaccgcgcgcgcaaggaaacgctggtggagtacggcttccgtctgccgtcggcgctggacaaccgcccgctgcgcttcgaggagttcgaggcgctggcgccgcagaccatctatgtttccgccacgccgggcaaatatgagctggagaaatccggcggcgatctgatcgatcaggtggtgaggccgaccgggctgctggatccgatcgtggaagtgcggccggtcgctactcaggtggacgatctgctctccgagatccgcaagcgcgcggcgatcaacgagcgcgtgctggtgaccaccctgaccaaacgcatggcggaagacctgaccgaatacctggaagagcatggcgagcgcgtgcgctacctgcactcggatatcgataccgtggagcgggtcgaaatcatccgtgacctgcgtctgggcgagtttgacgtgctggtgggcatcaacctgctgcgtgagggcctcgacatgcctgaggtgtcgctggtggcgattctggacgccgacaaggaaggcttcctgcgttccgagcgttcactgatccagaccatcggccgcgcggcgcgtaacctgaacggcaaggcgatcctgtatggcgatcgcatcaccgattcgatggccaaggcgatcggtgaaaccgagcggcgccgcgccaagcagcaggcctataacgaagccaacggcatcgtgccgcaggggctgaacaagaagatcggcgatattctgcagatcggtcagccggtcaaccgcgccaaggggaaaggcaggagcaaggcggcggacggtggcgctcagctgcagaacctcacgccgaaagcgctggatcagaaaatccgcgatctggaggcgcagatgtacacccatgcgcagaacctggagttcgagcaggcggctgcgctgcgcgacgaaatccaccagctgcgcgagcagttcatcgcgatttcctgaccgttggacggcgcccgcgctgtgggcgtcaaaattccttgtcggccgcgtcaaagctgttatggtgtgcggcccgatttgaccacgaagagtaccgaacatgagccaacaccagtctaaagacccgctgcacggcgtgacgctggagcaactgctgaataaactggtggatcactacggttggtccgaactgggcgcgcgcattcgcatcaactgtttccgcagcgatccgagcatcaagtccagtctgaagtttttgcgtcgcacgccctgggcgcgcaaagaggtggaagatctgtatatcgatatggtcagccatcccgccccggccagcgataacccctggctgcgcgggcgcgacggctaaattcggtcagcggcgggcagccagctccaccagcgcgtgatccagcgcctggcgcagcagctggcgatcgtggcggtaggggatgtcgctcgcttccagcggctgttgaatcaccacccgatcctgcacttcactggtgtccaccgccgggccgacaatcagcgcatcgatcatccggcggccgatcttctcttccatcagcgttagcttatcctttaacgacagtgccgcggcggccacgctcagttcgcggccgaggttgccgatatagatcatgctggcgctgctgcggcgcagcgcctgggtgagatcgtccagcagcagcagcggcatcaggctggtgaggaaactgcccggcccgatcaggatcacgtcggcttgcgcgatggcgtccagcgcttcgcgcgtggcgttgaccgggggcgacagcatcagctcctgcggcataagagtcagttggtcaacattcacttcaccgtaaacatggttgccttcgtgatcgtgcgccatcaaatccaccggctgctccgacatcgggatcagcgccgcgtccaccttcagcaggctgcgcaccaggttgatcgcttccagcgggcgcacgctcaggtgatccagcgctttcaacatcaggttgcccaggttatggccggccagttcgccgttgccgctgaagcggtattcgaacatcgccgaggcgacgctcggctcggtgatcagctggttgaggcagttgcgggtatcgccccaggcaatgccgccttccgaacggcggatgcggccggtggaaccgccgttgtcggtggtggtgacgatgccggtcaggcgggagcctaaggacgacagggccgacatcacacggcccagaccgtgtccgccgcccaacgccaccacgcggtcgagatcggccagggtacgattacgcataaatttccttacaaaggggctgaactgcccgcataaggtagcggatccggcataaaaacgcgataaagagtgtcatttgcgtgattctggtcaattcgtccacgcaagcgatgtttatcatggtttacccgaatagacggcgtctaaaaacgctgtatagacaattatatagcgaattaacgcgttggctatcgttgccgattagcgctagaattctgctgaaaaccacggtttcattccggctactcaaggtagcgggaagagaaatcaaactcctagcccctgcgcctacgttgttcatccggaacgatatggcgcctgggccgtggcgaagtcagccaccagggtgcagaggggaaacgctcgcatctcccgactttggaaaggtgttatggtaccgcaactcattgatgcttatgagcgcaagttctattacctgcgcttgtcgatcaccgacgtgtgtaactttcgttgcacctattgtctgcccgatggctacaagccgagcggcagcccgaaaagcttcctgtcgctggatgaaatccgccgcgtcagccgcgcgttcgccgaactgggcaccgaaaaggtgcgcctgaccggcggcgagccttcgctgcgccgtgattttaccgagatcatcgccgccgtgcgggaaaacccggccatccgcacgctggcggtcaccaccaacggctaccgtctggcgcgcgacgtcgccgcctggcgtgacgccggtctgacggcgatcaacgtcagcgtcgacagcctggatccccgtcagtttcacgccatcaccggtcaggacaagttccgccaggtgatggacggcatcgatgccgccttcagcgccggtttcagcaaggtcaaggtcaacgccgtgctgatgcgcgacgtcaatcaccagcagctcggcgcctttctcgcctggatcaaggatcggccgatccagctgcgttttatcgaactgatggaaaccggcgagggcggcgagctgtttcgcaaacaccacgtttccggcgaagtgattcgccggcagctggaacagcagggctggcagcgccaggcgcgcggccgcagcgacggcccggcgcaggtgttcagccacccggactaccagggtgaggtgggtcttatcatgccgtatgaaaaagacttctgcgccagctgcaaccggctgcgcgtttcttccatcggtaatctgcacctgtgcctgttcggcgagcagggggtgcccctgcgcgatctgctggcggacgacggccagctcgatgcgctgaaggcgcgcatccagcgcgggctgctgagcaagaagcagacccatttcctgcatcagggcaacagcgggatcacccagaacctgtcgtttatcggcggctgacagccaataggagcttattgaaccatgagccatgcgagcagcgagtttattgcggcgcatatcgccatcctgaccgtgtccgacagccgcggcgcggcggaagacacctccggccaatatctgcaggacgcggcgcaggaagccggccatcaggtggtggatcgcgccatcgtcaaagatgacatttaccagatccgcgcacgggtttccgcgtggatcgccgatgacaacgtgcaggcggtgctgatcaccggcggcaccggttttaccgcgcgcgacaacacgccggaagcgctgttgccgctgttcgacagagaggtggaagggttcggcgaactgttccgcatggtgtcgtacgaagagatcggcaccgcgacgatccagtcgcgcgcgctggccggcctggccaaccgcacggtgattttcgccatgccgggttccacccgcgcctgccgcaccgcctgggagcggattatcgaagagcagttggacgcgcgccatcggccgtgcaacttccagccccatttaaagaagccctgagtcatgacacagctaacccacattaacgccgccggcgaagcccatatggtcgacgtttccgccaaggccgaaacggtgcgcgaggcgcgcgccgaagccttcgtcgagatgctgcccgccacgctggcgatgatcgtcgacggcagccatcacaagggcgacgtgttcgccacggcgcgcatcgccggcattcaggcggccaaacgcacctgggagctgatcccgctgtgccacccgctgatgctgagcaaagtcgaagtgcagctggaggcgcaaacggagcacagccgggtacgcatcgaaacctgctgccggctgaccggcaaaaccggcgtcgagatggaggcgctgaccgccgcctcggtggcggcattgaccatctatgacatgtgcaaagcggtacagaaagacatggtgatcggcccggtgcgcctgctggcgaaaagcggcggcaaatccggcgattttaaggtgaacgcatgatcgatattcttttcttcgcgcaggtgcgcgaactggtgggtaccggcgcgctgtcgatgccggcggattacccgaccgtcgaggcgctgcgccaggcgctgtgcgcgcgcggcgatcgctgggcgctggcgctggagtccggcaaactgctggcggcggtcaatcagtcgctggtggcggcggatcatccgctgcgcgccggcgatgaggtggccttcttcccgccggtcaccggggggtaagcatggaaaacacccgcattcgcgtgggcgaagcgccgttcaacgtcggcgacgagtatcagtggctggcgcagtgcgacgccgacggcgcggtggtgaccttcaccggcaaggtgcgcaaccataaccttggggacgacgtcagcgcgctgacgctggaacactaccccggcatgaccgagaaggcgctggcggagatcgtggccgaggcgcgcagccgctggccgctgcagcgcgtgacggtgatccaccgcgttggcgcgctgtatcccggcgacgagatcgtgttcgttggcgtgaccggcgcgcaccgcagcatggcgttcgccgccagcgagttcatcatggactacctgaagacccgcgcgccgttctggaagcgcgaagcgaccggccagggcgatcgttgggtggacgctcgcgacagcgatcgcgaggccgcgcagcgctggcacgacgcggctaaataacgcgtcaacagcggaaacaaatcaagacctttgccgctttcgcgcggcctattctgtggtacgcttatagcaggcgaagccccgttcgcggggcttcggaatcttgtttacaacgcaaaaggtaaccgtcatggaccgatatccacgctctaatggttcaatcgtcgaacgtgccaacagcggcattcaggcctacatggcgcaggtttacggctggatgacctgcggtctgctgctgacggcgttcgtttcctggtatgcggccaatacgcccgcgatcctcaacttcatcttctccagccagatcaccttcttcggtctgatcatcgcccagttggcgctggtgttcgtgatttccggcatggtcaaccgcctgagcggcgcggtggccacctcgctgttcatgctgtactcggcgctgaccgggctgacgctgtcgagcatcttcatcgcgtacacctacagctcgatcgccagcactttcgtcgtcaccgccggcatgttcggcgcgatgagcctgtacggctacaccaccaagcgcgatctgagcggcttcggcagcatgttgttcatggcgctgatcggcatcgtgctggcttcgctggtgaacatctggctgaaaagcaccgcgctgatgtgggcgattacctacattggggtggtggtgttcgtcggtctgaccgcgtacgacacgcaaaaactcaaggcgatgggcgagcagctgaacgccgatgataaagacggcttccgcaagtacgccatcgttggcgcgctgacgctgtatctcgactttatcaacctgttcctgatgttgctgcgcatcttcggcaaccgccgctaaatccgtcgtctttcaagccttagggtatctggcgatcaaaaagctctgcatgtgatatgcagagctttttttatgcgatcttgcggcggaacagcgcgtaggcggcgctgccggtggtggcggttatcaccagcagcggccacaggctgcgccagatgatgctgaagctggcgtccttcaggtagatctgcttggtgatgtcggtgaagtggcgtatcgggttcacccaggtcagatcctgcagccacaccggcatattctccaccggcgagacgtaacccgagagcaggatcgccggcatcatgaacacgaacacgccgataaacgcctgctgctgagtggcgcacagcgacgagatcagcaggccgaaaccgaccagcgacagcccgtagagcagcatggtggcatagaacagcaacagcgatccggcgaacgggatctggtacaggaagatgccgatcaacagcacgatgctggactggaagctggcgacgatcagcgccggcaccgccttgccgataaagatctgccaggtggtgagcggcgagaccagcagctgttccagcgtgccctgttcgcgttcgcgcgccaccgacagcgaggtgacgatcagcacgccgatggtggtgatcatggcgatcagcgacggtaccacaaaccatttgtagtccagattcgggttataccagttgcgcaccaccagttcgctgttgttgggtttggcgcggttgccgagcagctcgttctgatattcctgcacgatctgctgtacgtagttggcggcgatctgcgcgctgttggagttgcgcccgtcgagcagcagctgcagcggcgcggtgtggccggcggcgatatcgcgcgagaactgcgccgggaagcggatcagcagcagcgcccgctggttgtcgatggtggtctttatctcctgcggattgcgcagcagcagcacatgggagaaggctttggccttggcgaagcgttgggtcagctccaccgaggcctggccgctgtcctcgctgtagaccgcgatggtggcgttggtgacttccagcgtcgcggcgaacgggaacagcagcacctgtaggatcaccggcatgatcaggatggcgcgggtttgcggatcgcgcagcagcgcctgcatttccttgatgataagcgtcaacagacggtgaaacatcgctctttctccttaatccagccggcgctgggttttccaggccgtcaggccgatgaacaccacggcggaagcgatcaggaacagcagattgatcgccagcacggtgccgacgttgcccgccaggaacagcgtttgcagcgtgctgacgaagtaacgcgccggaatgatgtaggtcaccgcgcgcacgatggccggcatgctgtcgatttggaaaatgaagccggacagcatgatcgacggcagaaaggcggcgttcagcgccaccatcgccgcgttgaactggttgcgggtgagggtggagatcagcaggcccatgccgagggtgctggcgaggaacaggctgctgatcagcagcaggatcggcagcgaaccgcgatagggcacgccgagcacccagaccgccaccgccatgcacagcgccatggcgatcatgccgaggaagtaataggggatcagcttggagagcagcagctcgctgcgcgtcacctgggtggacagcagagcctccatggtgccgcgctcccattcgcgggcgatcaccagcgaggtgagaatggcgccgatcaccgtcatgatgatggtgatggcgccgggaatgatgtagtgccggctgatggccgccgggttgaaccagtagcgcatctgcacgtcaatcagcggctggtcgctgctcccccgatcggcggcgcgttgctgctgccatacttgccatacgccctgggcatagccctgcacgaagttggcggtgttcggctcgctgccgtcggtgatcacctggataggggcgctgtcgtgcgggcgcgccatgcgctggtcgaaatccaccgggatcaccaccaggccgcggatcgtgccggcctgcatctgctggatcagctgctggcggttgtcgctgatggtcggttcgatatagggcgaaccggcgaaggcgtgggccaaatcgcgcgcgtcttcgctctgttgttccatcagaatgcccagatgcagcttgctggagtccaggttgatgccgtagccgaagataaacagcagcatcagcgggataacgaaggcgatcaggccgctgctgggatcgcgcagtatctgccgcgtctccttcaggcacagcgcgcgcagccggcgccaggagaagccgccgtcgtcgaatgggggtcggttatcgctcaccgtgtttcctcctcgtcgtagccctgcaccagctcgataaacgcctgctccatcgaagggctgggattgtcgtcgcgcgccacctgttgtttgagatcgtccggcgtgccggcggcgatgatcttgccgcgatacaccaggccgatgcggtcgcagtattccgcctcgtccataaagtgggtggtcaccatcacagtgacgcccttgtcgaccatgccgttgatgtgcagccagaactcgcgccgcgtcagcggatcgacgccggaagtcggttcgtcgaggaacagaatatccggttcgtgcatcagcgcgcaggccagcgccaggcgctgtttgaagccgagcggcagcgcgtccggcgtctgatcgaggatcggcgcgaagttgaaggcgcgcgacatttcgtcgattttgtcgcgctgcgccttgccgctcaggccgtagacaccggagaagaacttcaggttctgcgccaccgtcaggttgccgtacagcgagaatttttgcgccatgtagccgaggcgctggcgcgccttgccggaactggtcttcagatccatccccagcaccagcgccttgccgccggacggcactagcaggccgcacatcattttgaaggtggtggacttgccggcgccgttcgggccgagcaggccgaagatttctccgcgccgcacctgaaagtcgacgtgatcggtggcggcgaagtcgccgaattttttggtcagctgcaccgcttcgatcaccgtttcgccgctttcaccgttgacggtcggcatgatctccgccagcgccgagcgatggttggggccgccgccgagcagatcgataaacgcatcctcgaagcgcggatccgcctcgtccagttcggcgtccggtagatccagcgcctgcagcagctgccggtgatcttcgccttctttcaggatcaggcgcaggtacttgccctggatcacgccgtcggtgaccgccggcaggcagatcgcccgctgcagcaacgatcgatggctgcccggcggcgcggcgatcaacaccgtgcgcccggccatgcgctgggtcagatcctgcggcgcgccgctgaacagcagctcaccctcgttgagcaacagcacttcgcggcactgctcggcctcgtcgagataagaggtactccacaggatcaacatgccgtcattggccagctcgtgcaccatgcgccacagctcgcggcgcgagataggatcgacgccgacgcccggctcgtccagcaacagcacctggggttcgccgaccagcgtgcaggccaggccgagcttctgtttcatgccgccggacagcttgcccgccaggcgctcggtgaaacgcgtcagatcggtgaatttcaacagccgttcaaaggtctggcggcgaagatcgccggtaacgccgcgcagatcggcgtacagcgtcaggttctccatcaccgtcagatcctcatacagcccgaacttctgcggcatgtagccgaggatcgcgtgcagttgacgatcctgcgcgatcggatccagcccggcgacccgcaatttgccgctgctgggctgtagcagcccggccagcatgcgcagcagggtggttttgccggcgccgtccgggccgaccagcccgatgaccgcgccgctgcgcagggtggtggtcaggctggcgaccgccggtttctcaagcgacgggaagcgcttttccagcccttccagttcgatggtgtgcgcctgttccatggccggcctcagggtttggcgaagcgcagggtgaccggcatgccctggcgcagcgcgtcgtcggcgtcggtgacgatcacccgcaggcggtacaccagatcggtgcgcagatccggcgtttcaacgcttttcggcgtgaactccgcggttggcgagacgaaaccgatcttgccgtggtaaggcttgtcggggcggccgtcggtgtaaatttccagctcggtgccgggcaccgcctggttcaggctggtctcgttgacgtaggcgcgcacccacaccggtcgggtcagcgacagggtgaacaccgtaccgccggcgccgagcatggtgcccggctccaccgcgcgggtcagcaccgtgccggcggacggggagatcagcgtggcgtcttgcagattcaattgcgcctgcgccaacgccgcttcgctttgcgccacctcggccttggcctgttcaatctcttgcgggcgattgccgctgcggtattgcgacagcttgtccttcgccgcctgcaggttggcctgcgcctgattgcgggcggtgcgcgcatcttccagcgcgtcggcggacgtggcgtttttcgcccacagcccttgctggcgcttcaggaagctgtcggcgtaggcgaaggcggactggcgctgcgccatttctgactgcacctgggcgatctcttcggtgcgatagccggcctgcagcagcgacagtttggcacgcgcgctgccgacgttggcctcggcctgctgcagcgcgttgcgatagggggcatcgtccagtttgccgagcagctggcccggctgaacggcatcgccttcatccaccgtcagcgacgccaggcggccgtcgacgcggaagccgaggttgaccgtgcggatatcgacgttgccgtacagcgtcagcggcttatcctgctgctgttggtaatgccagaccgcgtaagcggcggccgcgatcagcagaattaacaacacgatcaaggcactgcgttttttgttcataacactccctgcctgaatttacgcgccgtgacgttggcgcagcccaataaccaaaatctcgatatgctcgctcagcaccgccgcgatttgcgccgcttcactttcaccaatctcttgccagccggcctgacggcggatggtctctcgcgccacgcggaacgacagcacctcgccgatcagcgcgtgggtatgcagcaccaggcgagtggcgtgctcgtcaatgccggtggcggccgacagcaggcggcacagccgctcgtgcatcggcgcgatcacctggcggtggatcagcggataggcctcggtcggggcgagctgttcgcgcgacatgattttgctcaggttcagcgtgtgcggctgggtcatcagctcgctgaaggccagcaggccacgctgcagcaagcgtagcgccgcgtcgggtgagcgttgttcgggcacttcttgcccaaagcgatcgacctcttcggccaacggggcgaacgcctgctgaatgaaatcggcgagcgactgcgctacggccagatacagcccctctttggagctgaagtagtaggtgatggcggcgatgttctggccggcgcgctgggcgatatcgcgcgtggtggcgccctgcaggccgaattcgccgaacagttcggtcgccgcggcgagcagttgccggcgcgtttgctcgccacgcgcccggccggcggcctgatgaggtacggaagctggcatgggtcacgctcgaagttaatcaatcatatgattaactttatgccagattgtctaaaacgcaaccgctaaccacaatgagttatgtgatcggcttcagacaatgctgaatttacggcagattgtgctctgggtgcgtaaaagtgctttttattgcgcgacttctgttacaatcgccgcctggtgcactgcagtttgtgccaatccctcgtggtcatgcttaatgccccgtctgatcatcctcccaggaaactgcaccgaacaccgttaggttaggggggatctggagtttttctctttatgtcatttgaaaccctcggcttaagtgctgaaattgtgcgcgctgttgaagaacagggctatcgtgaaccgacgccaatccagcgtcaggctatccctgtcgtgcttgaaggtcgtgacctgatggccagcgcccagaccggcaccggtaaaaccgccggttttaccctgccgctgttgcagctgctgagcaagcatgaccatccggtcaagggccgtcgcccggtgcgcgcgctgatcctgacgccaacccgtgagctggcggcgcagatcggcgaaaacgtcgatgcctacagcaaacacctgcgcctgcgttcgctggtggtgtttggcggcgtgagcatcaacccgcagatgatgaagctgcgcggcggcgtcgatatcctggtggcgacgccgggccgtctgctggatctggagcatcagaacgcggttgacctgtccaaaatcgaaattctggtgctggatgaagcggaccgcatgctggacatgggctttatccacgacattcgccgcgtgctggccaagctgccggccaagcgccagaacctgctgttctccgcgaccttctccgacgacatcaaggcgctggccaacaagctgctgcataacccggcctcggtggaagtggcgcgccgcaacaccgcgtccgagcagattgagcagagcgtgcacttcgtcgacaagaagcgtaagcgggaactgctgtcgcagatgatcggcgaaggcgactggaaacaggtgctggtgtttacccgcaccaagcacggcgccaaccatctggcggaacagctgaacaaagacggcatcactgccgcggcgatccacggtaacaagagccagggcgcccgtacccgcgcgctggccgatttcaaagacggccgcatccgcgtgctggtggcgactgacatcgcggcgcgcggtctggatatcgaccagctgccgcacgtggtgaactacgagctgcctaacgtgccggaagactatgtgcaccgtatcggccgtaccggccgcgcggagcgtaccggtgaggctatctcgctggtgtgcgtggatgagcacaagctgctgcgcgacatcgagcgtctgctgaagcgtgaaattccgcgcattgcgctgccgggctacgagccggatccgaccatcaaggccgagccgatcatcaacggccgtcagggtggcgggcgcggcgcgccgcgcggcaacggcggcggccagcgttccggtaacggcggcggtcagcgcagcggtaacgcgaacggcggccagcgtgaaaaccgtggcaacgctaacggtaacgcccgcccgcagggtgatggccagcgtcgttccggcgcgccgtcttcgcgccgcccgcgcaaccgcaaaccggccgaataagcctgattgctcaaagagtaagccgccgatacgggcggcttttttttttgcctggcggaacggcattttcgtactaggctggacggtggctacccctagattccaggagacggagatgaaattaaagtgcgcaattctcgatgattaccagcaggtggcgctcaagatggcggactggtcggcgctggccgatcgggtggaggtgtcggccatcagcgcgcactttaccgatgaagcggagctggcggtgcatctgcaggagtgcgacattctggtcatcatgcgcgagcgcacgccgatgaccgcctcgctgctggctcggctgccgaagctgaagctgctgatcacctccggcatgcgcaacgccgctatcgatctggccgccgccgccgagcgcggcgtggtggtgtgcggcaccgccagcggctcggccgcgccgatggaactgacctgggcgctgctgctcgggctggcgaagcatatcgtgccggaaagcgtcgggctgcaaaacaatggcccgtggcagctgggcttaggcgtcacgctgcagggcaagacgctggggttgctggggctgggcaagatcggcggccagatggcccgggtggcgcaggcgttcggcatgcgggtgctggcctggagccagaacctgacggcggaacgggcggcgcaggagggcgctgagctggcgccgtccaagcgggcgctgtttgagcagagcgactttgtctccattcacctggtgctgagcgatcgcagccgcgggttggtggggcgtgatgaattggcggcgatgaagcccaccgcgtacctgatcaatacctcgcgcgcgggcatcgtcgatcgggcggcgttggtggacgtcctgcaacagcgtaagatcgccggcgccgggctggacgtgttcgagacggagccgctgccggccgacgacgtgtttcgccagctgcccaacgtgctggcgacgccgcatgtgggttatgtggcggacgacaattaccgcgcctacttcaccgaggcggtcgaggacattgcggcgttccttgccggccaaccgatccgccggctgggctgacggcatttttaatgcccgctgaggcttgtctggcgcgggcattcacccgtatcattgcgggtctttttttagctgggattggtcatgcgcgtattattggctccgatggagggcgttctcgattctttggtgcgtgagttactcaccgaagtgaacgactacgatctgtgcatcaccgaatttttgcgcgtggtcgatcagctgctgccggccaagtcgttctaccggctgtgcccggagctgcgtcacgccagccgcacgccgtcgggcacgctggtgcgggtacagctgctggggcagtatccgcagtggctggcggaaaacgccgcgcgtgcggtggaattgggctcttacggcgtcgatctcaactgcggctgcccgtccaagctggtgaacggcagcggcggcggggcgacgctgctcaaagatccggaattgatctaccagggcgccaaagcgatgcgcgcggcggtgccggcccatctgccggtcacggtgaaggtgcgcctgggctgggactcctccaatcgcagctttgaaatcgccgatgcggtgcagcaggcgggcgccagtgagctgacggtgcacggccgcaccaaagaggacggctacaaggcggatcgcatcaactgggcggcgatcggcgagatccgtcagcggctgagcatcccggttgtcgccaacggcgagatctgggatcaccagagcgcgcaggattgcctgcaggcgaccggctgcgacgccatcatgctggggcgcggcgcgctcaacgtgccgaacctgagccgggtggtgaagtacaacgaactgcgcatgccctggccgcaggtggttgagctgctgcaaaaatacgtccatctggaaaagcagggcgacaccggtctgtatcacgtggcgcgcattaaacagtggctgggttatttgcgtaaagaatatgatgaagccaccgaactgttcagcgaaatacgcgcgctgacgacatccggggatattgcgcgcgtcatctgccgtagctaaaaataaacccgcacgcagcgggtttatttaaatcggtattatcaggcggctttgtcgagacggttcaattctatctcgatatcctgaatggttttttccagcccttccagacaggcgccctgcttattcaacaggtcgttaatggcttcggcgaataccttatttttgcattccccctgatcgaaggccagccagtgtgcggagagcgtctcgatattcgactgtgcgtagtggcgcatttccttcagctgggaagcgacgttgcgtaaattatccagctgcgcctgtgcatttgcattgttgctcatgaatttctccttgagttggccgttaaataatttcgactgcgggatcaagcttaccctatttaaataaaaatatcaccctgagtggtctgggtggttatttttgagtgggtgtggctatatttattgttcggctgaacaaggacttgggtggaattgtaaaaatagataaatacggtgtttttggcgattattttcggccatcccatacgggatgaccgttattctaacgcttaagagtgatgcttattatgccgcgtccgccagcataaacatgccgtaggggtgaatttccagataatactgctcgccgacgttcggttgcaggcgggtggcgttaacctgcagcaaaatttgctgcccgtgccacgccaccgttacctcatactgcggccccatgtaggcgacatgttcgatcacgcagcgctggctttcatcgccatgctcgctcagcgtgatcgcctccgggcgcacgcccaccgtgccggcgccctgggcggcaaagtgcgcggggcgcggcagacgatagccgctgatgtcgacatgatcggcgctgaagctggccgggaacaggttggcgtcccccataaagctcgccataaagcgcgaggcgggctgccgatagagatcctgcggcgagcccatctgcatgatatgccccttgttcatcaccagcacggtgtcggagaccgcaaaagcctcgctctgatcgtgggtgacgtacagcgacgtgatatcaaactgcttttgcagctcgcggatcttttcacgcatgctgcggcgcaggttggcgtcgaggttgctcaacggctcgtcgaacaacagcactttcggcttgaggatcagcgcgcgcgccagagccacgcgctgctgttggccgccggagatctgatcgacatagcgatcgtcaaaccccgccagatccaccatcgccagcgcttcctgcacgcgcgctttcacttcggcgcgcgggatgccgagcatcttcaggccatagccgacgttttcccccagcgacatatgcgggaacagggcataagactggaacaccatgcagatatcacgctgctggatggaacgatgggtaacgtcttcaccatcaatgaatatctgcccgtcgctcggcttttccagcccggcgaccaggcgcaaaatggtggttttgccgcagccggaagggccgagcagcgtcaccatttgcccccgcgggatggtgagcgtgatgttatcgattaccgtgttgttgccgaaccgtttggagacgttgcgcagttcaacgaaatttttctggctcatcatgggctccattacgcctggtttttggcttttgaacgggagatgcgtgcctcgccgatcagccagtcaaagaggaaaataatcgccagcatcaccacgatcagaattgaaccgtaggcgatcgccacgccgtattcgccgtcttccacgcggttgaggatgtaggcggtggccacgcgggtatcgggcgtcaccaggaagacgatggcgctgacggtggtgatggcgcgcacgaagctgtagatcagcgccgacaggatcgccgggcgcagcagcggcagcaggatgtgcgtgatggtgcgcagcgagccggcgcgcaggctgagcgaggcttcgtccagcgatttgtctatctggcccagcccggcgatcccggcgcgaatgcccaccggcacgttgcgcatcaccatcgagataatcacgatggcggccgtgccggtgaggtacaccggcgcgccgttaaaggcgagaatgtaagagacgcccgccacggtgcccggcaccgcaaagcacagcatggtggtgaactcgatggtctttttgcccttgaactgctggcgcaccacgatccaggcgatcagcaggccgaacgcggcggtgatcggcgcggcgatcccggcgtacagcagcgtatcgagcagcgaaggccacgcgccgtcgctcatgccctggccgaacagcttgatgaagttatccagcgtcagcgtgtaatccaccccccagttgacggtgaagctgccgtagaaaatgctgccgtaaagcagggcgttaaaggctacccacaccgccagcagcgcgatcacgctccataccagcgtgaccggcagcggctgtacgtcgccgcgataggatttgccggacacggtgacgtaggaacgcttgccgatccacatatactggatgcagaacaccaacagcgagaacagcagcaggaaggcgccgagggtgctggcggcctgataatcgagctgtgaaccggtaatgtagaaatagatttgcgtcgccagcacgtcgaagttgccgccgagcaccagcgggttgctgaagtcggccagcgattgcaccaccacgatcagaaacgcgttggccagcgccggtttcagcagcggcacgaacacgccgttaaaggtttgccaacggctggcgcgcagggtgtaggaggcctcttccagcgaaggatgaatggtcttgatcgcgccgtcgaggatcatgaacgccatcggggtgaacgccagcacctgcgccagccagatgccggtaaagccgtacagccagttggtgttggtcaggccgaaccaggccaccatccactcggtcacgtagccggagcgccccatcatcagcgtgacgcccaggccgacgacgaacggcggcgtgacgatgggcaggatggagaagatgcggccgataatggcgctgcgcttggcgatgcgggtggtgtaaatcgccagcaccaggccgaagaaggtgcagccggcgcctaccgcgatcgacagggcgatggagttgaggatcacctggacgatgtgcgcctgcgacagcacattcataaacgccagcggcgcgaaagcgcccgtctggtcggtgaacatcggaatgaaaatcgcgatgctcggccagacgatgaagacgccgatcagcgccacgatggtgaccagcgcgccgataacgaaacggtcgccgcccagccagtcgaggcgggtcagcgccaacgtcatgatggcgcccagcgcggtcaactgcaccagggtggcgtagcctaaaccgcgccccgccagcgtggcgctgacgacgataaaggccatgcacagcagcgcccagccggcgtcgaacgcgtggcgccgccgccgttcaccgcccgccgcagcgtaagggcgcagcagcagcaggctcggcagcaggcaccaaagccagctgatattgcgatttgaccagccgtaggccgcgaggatctcttcgccggtggactccagcaggccgtaatccaggctccagctcggcagcagggcgaacgccagccagccgagcaaaacccaaaggaatatcgcatctcgttttttcacgagatggagtgcatgtgtatgtgacataagtttcccggatgttcaggccgggcaaaccgtgaggcttacccggcaacaggcgcagaatgtgggcttatttacccatcttgacttcgctgacccatttgttgatcagcgccttgcggacctcggtcgagccgtacttgtccatgtcgtagttgatcagcttcaggtcgtcgagcttcagcgagttcggcgaggtgtcggcggtggtattggtcaggatctgataggatttgccttgcttccacgccagctcctgcgcctctttcgacagcacccaatccacgaacagcttggcgttgtcgaggttgcgcgcgcctttgaggatgctgacgccgccgatttcatagccggtgccttcgcaaggcgagatcagctccagcggcgcgccctgttccttttcgagcgagtagtcatgcaggaaaccgatgccgatcgccgtttcaccgcgggcggcgttgcgcgccggggcaatgccggacttggtgtactgcgaaacgttggcgttcagctgcttgaggtaatcgaacgcctgatcgtctccccacagctgggcaaaggtcgccagcgcggtgtaggcggtgccggagctttgcggatcggcgatttgaatctcgcccttgtattccggcttggtcaggtctttccagcattttggcaccggcaggtttttctctttcaggcgctgggtgttgacgccgaaaccgagaatgccgacgtagaccgccgaggagtagttgcctttcagcttggccggatcgcggaattgcgtcatcacctgttcgaggttcggcgatttgtacggctgcagcagccccatttcaccggcctgggattgcggatcgagcgtgccgccgtaccagacgtccgcctgcgggttcttcttctcggcatccactttcgccagcgtgctgccggatccgttgcggatgaacgaggttttcacgtcatatttctcgccgaaggctttggtttccgcttcgcacatttcattggtggcgctgcagtagaccaccaggcggcccttggcgtgcgcggcgccgctcagcgtcgccagcgcgatgccggacgctatcagggtagtgacccacgtttttttcattgttttatccttctctcggtagaggtggtaacgctcgccatcagcagcggcatcagcaataaacccataagaacggcggcgatggacagcaaactgaacatgcccgaccagccgtagccttcgatgacccgcgacagcggccagcccgccagcgccgcccccaggtaggcgaacaggccgagaaagccggtgatggagcccgcggcgcctttgtgcccgcattccacggcggcgaggccaatcaacatctgtgggccgaagacaaaaaagcccaccgtaaagaaacagcccgccagcagcgcgtagtgatgcaccggcgccagccacagcgcggcgacggaaaccatcagcccgagcgtgaacagcaaaatcatcggcgcgcgctgcccgccgaacagcacatccgatccccagccggcgaacagcgcgccgagcaggccgcctatctcgaacagcatcaccgtcgcgttggcgctgagcaggttaacgccgtggctttccgtcaaccacagattgccccagtcgttcaaggcgatgcggatcaggtagaccagcacgtaagagacgcccagcagccagatcatcgggttcttcagcatcgtggtgcgcaacatccgccacagccccatcggcgggctttgctgttcctggcgcagctccagcggatcgtggcgccaccggccgaccgacggcaggccttcttcctgcggtgtgcctgtcagccgccgcgtcagccagaggcccaacaccatgctgacggcccccgggatcaacatcgccgcctgccagccccagcgctgggcggcgaaggcgctgatcagcggcacgatcgcgccgccgaggttgatcgacatattccagcagccccaccagaagccgcgctcgttgcgcgaataccagtgggtcagcagccgcgcgcagggcggccagccccagccctgaaagaagccgttcagcgcccaaaccgccaacagcagcgtcagcgattcaccgaaggcgaacgccacgttcagcacgccggtggcgaacaggccgatccccataaacctgcgctgcccgtggccgtcgtgccacaatccggcgctgaatttcgacaggccgtagctcagataaaacagcgagccgagcaggccgatgtcccctttatccagccccaaatccatttgcagcgccggcagcacgtaattcacgcttttgcgcgtcaggtaaaaggcggcgtagccgatgaccatgtacagcagcagtcgcgggcgcagcgcgcggtaacgatgatcgatttcagatgccgagcgtgtctgcatagccgtctccctggtgatgactataagaaggtgaaagggaaaggggatgagagaaagtccggactggctaagactttttcctagttagtcggcggtttgttgcaaatttgtgggcaggttaacaattacccgcgtgccgcgctgcgtgtccagcgtcagttcgccgccgagcgcgctgacccgttcgcgcattccctgaatgccgaggccgggcgccttgtccgcccggatgccgatgccgttgtcccgcacctcgaggtgcaaaagtgccccctgttgatacaaaacgatggcgacttcgctggcttcggcgtgtttgcacacgttgttgagcagctcttgcagcagccggtagagggtgaagcgcaccgtctcgccggcgggcgtgtcgatgagccggtagtcgaaacggcaacggatgccccgttcgctgaaggcgaattcattcagcaggtggtgaagcgcgtctttgaacgccagctcgtccagcgcgggcgggcgcagctggcgcagcagctggcgcgtggagtgatgtatgcgccgggcgagatcggctatctggttcgcggcggcctgggtttgcgccggatcgcgcgcccgcttgaccagctgcgactgaatttgaatcgcggtgatgttctggccgatttcatcgtgcagctcgcgcgccaggttctttcgcgtgtcttcttcggtgtggatcagtttttcggtcaacgcccgccgcgccgccagctcttcttccagccgtcggcgatagtggtgcaggttttgcgccaggtgctgctgacggctgatggcgatgcccagaccgatgccaagcagcgcctgcgtcgccagaaagatttccagctcgaccagattgccgaaccccacgccgacctgccgcgcgagggtgatcatcatgctgccgagcaggccggacagcacgccgccctgccagccgaacttccacgccatcaccacgttcggcaaaaacaccacgatcagcagcaggcgttcgatttccggcgacagcaccatctgggtgccgatgccgataacgaaaaacaggctgcaccagatgattaaggacgcgcgcagcggcgggttgctggtgtccagccccagcagatggtagcggtgctgctggcgcagaaattcaaaaatcaggtagacgaacggggtcagcaagacaccaccggtaaatgacgccaggccgagcagcatcgccgggctgtgtgcgaaaggcgcaagcagggcggtattgagcagcgaggcggcggtcactgcggccagcagcagcgtcagccgttgccagtagagcggaaaacggcgccagaatcgctgtgcgagcgcggccgggagcagggtgatgaacggcgcggccagcaggctgtagccgctcagcaggcgttcgccgtgcagccagaacagcagcagcaccggcggtattatcagggcgggccaatagcggcgcgccagcaggatcagcagcgcgagatagacgccgtgaggcagaaacagcgccgcctgattgccgttgtgggtcaggtagaaaccgagcgtccacagcatcagccagccgctgccccaggccaacaggataaacagcgagataacccagggccggaagcggggcgacatcaatgccccgccagcagctgatggtcgagggcgaaatgcaccagttcaatggtgctgctgcactgcagcttgcccaggacgttggcgcgatgcacgtgcaccgttttgtggctgagatcgagcttgaaagcgatctcctttacgctgtcgcctttgaccagcagatcgaagatctcgcgctcgcgcggggtcaacgcttccagcgccgtggccggctgctcgccgccgcgcagcgcccgcagcgcgtcggcgcacaggtaatggccgcccatatcgacggagcgcaccgcctgcaccagttcttccggcccgcagcgtttggtcagatagccgctggcgccggcatccagcgcgctctgcacgaaggtcggggagtcatagatactgaggatgatcgcgcgaaactgcggcttctgcgcccgcaggcgtttcaacaggctcaggccgttttcatccggcatggcgatgtccatcaccgcgacgctgacgtcgtcgcgcagcaatgccggccaggccgccgccgcgctgctgtattgccccaccacgtcgagatcgtcctcgaggctgagcaattgcgcaaagccggagcgcaccaccacatggtcatccaccagtatcacacggatcatttttcgcactctgttgccgaatcatggccctatgatgcctgccgccgcggtgctggcaatcagccaagcgcggttatgcaatcggtgtaacagaatcgtaataaaagggcgccgccggtgtaatgctggttacttaagcctgactggtattttttatccagtatctttacgtgatgtgcaggatgaattgccgtaaataccctgaatttttctgttaccacaatgaacggcaattggaggggccgaaggcgcggcccctccacccgcgccttcgcttaacaccgtctgtccgctgcgcggataccctcgcagcgtctgcattgtcgggcgggtcggctgcgacaaacgtccctgttagtctcgcctcaaccggccttccctggccggttgcccctgacaatgctgtcttgctcggcagccggtgatgcgcgccaaaggtcaaccccgtgctagcagctcccgtcctttatgaggtcatggcagagaagaggaatcggagatgagcgcggtattggatgcccttgaagacgccgaacgcaggcatagcgtattaggcgaaaccgccatggacggcggtttcaggtgagacaggcagggacgcctgtcgcaaccggcctcaatgcggtatggcggagagagggacgttggcaaagccaaccgtctgatagggcaaaggcgcgggttgccaggggccgcgccttcggcccctggctcggtcgaggcgtatgagcctcatggcgcatctcacctttatcgaccgaaaactgcacaaatacgttcagaaaaacgctaactgatcagcattacgccgctggcggcgttaacgatccacatcgatggcgaaatgctgccacagtacggcgcgccgttcctcttccgaatgcagcgtcgtttcgtggcgctggtgatcttcggtcacgatcagcttcatgtcgctgagggtcacccggccgtggtccgtcggccgtgaacacaccaggcgctgggtgaagtgcgactgcggcgaggtgctgtggaatcggcacatctcgtcgaactcgtgcaactcgcgcggctgaacggtaaagcgatacagcgttttggcatgcgagcgttggtcgccgttgcggcgctccagcaggtaatactcgccttcccgctccaggtggaaggtgccgctggcctgcggttgcggctcggcgacgacgatcttcagcggcgtcaggaaggaatcgccgaaaccgacatccaccagccaggcctgccccgccagatccacccgcagcgccagatggtcgtagggcgggccgaaatggccgtcgcgcgtgcggatctcgccggagatgaagctcaccttgaaaccgatctcccgcaacagcagggcgaacagcgtgttcagctcataacagaaaccgccgcggttacgctcgaccaccttgctgaacagcgcctccggcgccagctgaatgccctgatgataaataatgctcaggttctcgaacggtacgctcagcatgtggcgatggtgcagctgttgcaacgtggggaggtcagggcgggcggtgccggcaaagccgatatgctgcaggtagcgttgggtatccacagggtgtctcgcatgagaaaaagtaggcataaaatagcgggctttgcggcgtttgtgagcgcattacgtgctgcgttgttggcataactcataaccaaatcgactcagatgtcagcatggctgccgttacactgaatcgatatggataaggagaaagtatggatttaaccttgaaagcgcagcgatttgccaatgacgctcaccatgcctgcaatcagcggcgcaagttcaccggagagccgtatatcgtgcaccccgcggcggtggtggatttgctgcagcgggctgagccgacgccagaaatggtcgccgctgcctggctgcatgatacggtagaagatacggcggtgaccctggcggatatccggcgagaattcggtccgacggtcgagcgttatgtggaaatgttgaccgacgtgcagcctcgcagctacggcggtgagcgtctgcaccgtaaaaatgccaatctgcagcacagcgcgcaggcctgtgcggaagcgcagaccatcaaactgtgcgacttgattgacaacagcaaaaacattaccgattacgatgtctcctttgcccgtcactatctggtggaaatggcgcgcttattggctgttttatcggcgggcgagaccggcctgttggccttggcccgccgacagtgtgcggaagcgatcgagcgcatcaacgatcgtcatggagacgacggctggttcgacgcgttgtggcggaagtatgaggcccatcttaagctggatgagctgaaaactgggtcagcagcaaaataacaggaatggtgaccgccgccagcaacgtttggatcgtgatgataccggccgacaagcgatgatcgccgcccagcagtttcgccatgatgtaggcggaaggtgtacagggtaaggcgttaaacaggacgatagtcgccagcaccgggccggagatgcccagggtgatgccgattcccagcgtcaacagcggtaccagcagtaacttgacgaaggtcgattgcagtacggggccctgtgccgtacgcgccgctttgatatccagccccgcgccgaccgccagcaaccccaacggcagagaggcgccgccgagaatggtgagaatgttctccagcgccgtgccgagcgaccagccgctggcattgaaggccagaccggccaagaccgaaaggatcactgggtttttccccagcgctttggcgatctgtctgccgccggggcgggagccctggccgtaatgcatcagtatgacaatcgaggccacgttcaacagcgggatggcgacggcgatgctgattgaggtcaccgtcaggccggtgtggccgaaagtcgccgccgctgcggcaaccccgatgtaggtattggggcgcagagcgccctgtatgacggaagagaaaaccggcccgggctgttttagccagattcgccagaggtacaacgacaaggcgccgatcaacacggcgcccaggaccgacagggcgatcggccgtaccggaaactggctcaggtcggctttgccgacctgaataaacatcagcgccgggaagagataaaagtagttcagcttctcgcagggcagccagaaagcccgatcgatcaggtttttgtgccgcagagtgaatcccatggcgattaaaaatatcaccgggatcagagaaaagagagtcgtcgtcatggggagcctataaatagcctttagtgagaacggccacgccatagaaggcaataaagccggttaccattttttcataaacgggagcgctggttctcttgaacagcagattgccgacgaccagatacaccagcagagccagcggtgccgcggcgaaaccgtcgaggttcagggcttgccatttaatgcaggccagcgtggccaattggattaaaccgaacatcaggtaataacgggagacggtggttcttatctccagtttctcgcgatggctggcggtagcgtagagtgccagcaaggcgccacccatgttggtgacgccatgtatcaggcccatgactgcgatataagcgcgctgatgtttgccgagataacgcttcacggtttcctgcagtgacagacgaaagcgcatcaaggcggaaaacagcaggatggcgcccaccagcagatcgacattcatcttcaccgtcgaatgcaagaccaggctcagcgccagaatgacgaaaatggcgcaaatcagcatattgaccttttcgcgagcgggaaaagcaattcgtcgggcgccaagcgtctgcgtcagagagatcagcaccgacgacggcagcagcagcccaagtacggaggagaaatcaacgcccagcattaatagcgtcggtgtaccgaacaccaagatgcccatgccgaaaaccgattggatcacggcaaatagcgcaatcaccagatagaacaacgcatgattatccatcaggccacctcttctttccggtagggttcccgcgccgcgtcagattgcaggtaggcatcggcgctgagcgtgcgcaagatattcccgctgatatgctgattgtcttgctgggcgctgaccagcagcaaaacatcgtgccgatttatcaatccattgtctgacaggacattcagagccaaacgttcggtttccggctgtgtcagatcgatccgaggcaatgtcaggccggtgatgcctggcagcatattccagctgcgcaccgtcgccgcatcgttgccgaatgcgacgatcgggatgccgatgttggccatggcggcgatgcgcacgctgtaacctgtgcgagaaaacaccaccacccgggagatcggcaaggcgcggataagggcgccgacagcctgtcgaatatcgtcaacctgcgcagggggggatgagtggggcgcatgcgctaaatgctgttccgcctgatgggctacgctggcgatacgggcaacggcctccagaggatagcggcctacggcggtttcaccggagagcatcaccgccgcggcgccatccagcaccgcgttggtgatgtcgctgacctccgctttggttggcagcgggttctctatcatgctgtgcagcaattccgtcgctacgatggtgggtttgcccgcatgggaggcggctcggaggatctgtttttggtagagagaaacgcggtcgatcgaggtttccaccgccagatcgccgcgatcgatcatgataacgtcggcggcggcgatgacttcctccagatgctctatgccgccgctgttttccactttcgccacgatgcggggcgtatcgcctccgatcagcgttctgatcgcgttgatgtgtgccgcgctttcgacgaagcttatgccgatgtagtccacttgatgcgctttggcgaaggcgatcatgtcgcgatctttctccgttatcagcgcctgcccgagatcgatgccaggcacattgatgcctttgcggcttttcagttggccgtccatgtcggcctgcaggtagatgtcccgatcgacgatgttaacgacctggaacgagagggtgccatcatcggcgaaaaccttatcacccaccgtcagccgttcatgcaaccggccgtaccccaccgggactttttcctccccgttatgtgaggtatcggtcgtgaggatcagcgtttgccctttagtgaatgagggttcgtgtttcagttgcaatgtgcggatttttctaccgggaatgtccaacagcaccggcgtatccggcaacgttttacgcagcagggcgatggtttccgcatgccagtcgagcgtgttgtgtgaaccgttcaatcgggcgacggacatgccggctttttccagcgctgccaacgtgttgatatggcgagaggcggggccgatggtagcgataatgcgagtctttgccatgataaatgctccgaaaagttaagatgcatttatctatgacagttttgtgacagcggggaaaataggggtttaatctaactaatatataaaaagttataatgagttttggcgtcagagcgggtgtgccttatacatttaatgatgaaaataaaatggttatacaatttacttccatcgtatagataaaatattgataagcattactccttttattcctcgccgtgttgggcatcactgctgccgcaaactgtcacttgccggcgctagcctgtccccctgagttcaacgttgcaggagaacggctatgcaagatttcaaacatcgggtggcgctggtgaccggcgcgtccaccggcattggcgaagcgatcgccgccgagctgtttcggcgcggagccacggtggtgatgaccggccgccacacagcgcctctcaccgccgccgccgcgcggctcgatcccgacggccggcggttgatgacgttgcgaatggacgtgcgcgacgcgcagtcggtgcaacagggtattgaagagatcgtgcggcgctgcggcgcgctgcatctgctggtcaacaacgccgggatcaccggcccgcacgaggtggatatcgatcggtacgcggtcgaagattggcatgaggtgatcgccacttgcctgagcggcacgtttttcggcatgaagtacggcctgccggcgatcgtcgccggcggcggcggggcagtggtgaacctctcttccgccaacggcgtggtgggcattgccgggattgcgccctataccgccgccaagcatggcgtgctgggcctgacgcgctcggcggcgctggaattcgctacgcgcggcgtgcgcgttaatgccgtcgggccgggttatgtggatacgccggcgatgggggaactgccggcgtcggcgcgggcgcagatggccgcttcgcacccgatggggagaatggcgacgcgggaagaagtggcgaaaacggtggctttcctgctttcggacgacagcagtttcaccaccggtgcgttttacagcatcgacggcggttataccgcctgctgagccagcgcctgcagccagcggagaaacgccgctgcgccgggtttttccagcgtgcgcggcgggtaaaccacgtagtagggcttgctgagcggcagcgccggttcggccagggtgaccagccggccctccgccagttcacgggcgatcagccgccgctggccgagcagcaccccgcgcccttgtacggcggcgtcgatggccagcgaggtcaggttataggtcagcccgcgccgtggcggcggcgaccgatcggcggcggtgaaccactcgtgccagcccggcagaaactggctctccttgccccagtcgacgtggatcagcggcagctgcgtccagtcgccgcgatcgcgcagcgccgggctgcatactggctgcacccgatcctgaaacagctgcaccttttccagcagcggataatcctgatcgccgaagcacagggcgaaatccgccgccgaatgggcgaaatcgaccgccgcatgggtggcgtgcagccgcagatcgccgtcggggcactgcgccagccagtcgcccagcgccgggttcagccatttagacgccagcgccggcagggcgaacaccgtcagcgcctgtttgccgcgctggcgttcgacgtgttgctgcgccacgcgcagcgtttcaaacgcctcctgcacgtaggccaggtagtccgcgccctgttcggtcagcgtgacgccgcttttggcgcgaatgaacaatgtgatgcccagatgttgttcgagttggcggatctgctggctgacggcggcggcggtcagcgccagcgcatccgctgcgcgggccaggctgccggtgcgagcggcggtttcgaacgccagaatggcgctcagcttgggcaagcgcgcacgggacggtgagtgcatgagcagggcttatcgctaagaattcgttagcttatccataacgtatttttgttatggcggcaatgcggcattcgctacagtgagaggcatccggctttcgcacacgaggggaacgtcatgccgccacttgccgatattatcgatctgtccgcccatcccatcgatgacgccgcgttccgcgcccgctgccgacaaacgctggcgcgcgccggcgcgctggtgctgccgggatttctgcgtgaagccgcgctggcgacggtgcggctggagggcgctgaacagcaccatgcggcgttttacgccaccagcaaacacaacgtgtatctacggccgcaggacgacgcgctgccggccgaccatgcgcgcaaccggctggtggtgtcgtccaagggctgcattaccgacgaggatattccgccgcagtcgccgctgcgcgcgctgtacgacgctccggcgtttcgcgcgttcctgtgtgcggtgctgggcgaggcgcagctctacccctacgccgatcggctgtcgtcgatcaatctgcattacgcccataccggtcaggagctgggctggcattttgacaactcctcgttcgccatcactctgctgatccagaaaccgcaggcgggcgggcgcttcgaatacgtggagaacctgcgcgacgccgatcgcggcgagatgaactatgccggggtcacgcaggtgctggacggcgagcgggcggtcaaacggctggcgatggaggagggggatttggtgctgtttcgcggacgcaacgccatgcaccgggtgacgccgaccgaaggcgacaccacgcgcatgctggtggtgttggcctacaatgcgcagccggacgtgatgctgtcggaaagcgcccgaatgacgttctacgggcggttatagcggataaaaaaaaccgccccggagggcggtttgtcgattcagcgttggctctgttcttcgtgagcctgctgttccagcttcacttcctgcgcgcgtttgcgcaggccgaaccagcccagcgtcagcagcaccgccaacaccggaatggtggcgatggtccaggtgccgttcgggtagtcgaaggccatcatcaccaccacgaccagcaggaacgccagcgtcagccaggaggtgaacggcgcgcccggcattctgaacgacaccggctgcgcgcggccttcgcgcacggctttacgcaggcgcatctggcaaacgatgataaacgcccaggaggcgatgatgcccagcgaggcgatgttcagcacgatctcgaacacctgcgccggcaccaggtagttgagcaccacgccgatcacatagatgccgcaggtgaccaggatgccggcgtaaggcacctgctggctgctcattttggccatcagcttcggcgcggagccgcccatcgccagtgaacgcaggatgcggccggtggagtagaggccggagttgaggctggacagcgcggcggtcaacaccacgatgttcatgatggtgccgatgtaaggcacgcccagcttgctgaagaaggtgacgaacgggctttggccggcctgataggcgttccacgggagcagcagcaccagcagcaccacggagccgacgtagaacaggccgatacgccagatcacgctgttgatcgctttaggcatcattttggccggatctttacactcgccggcggcggtgccgataagctcgatgccggcgaaggcgaagatcaccccttgcaccagcaccagagcaggcaacaggccgtgcgggaacatgccgccgttttcggtgatcaggtgcatgccggtggtgtggccggcgaccggggtgccggtgccgaggaagacgacgccgacaatcaggaacagcgcgatggcggcgaccttgatcagtgcgaaccagaactccatctcggcgaaccacttcacgccgatcatgttcatggtggcgacgataccgagcgcgccgagggcgaacagccactgcggcacgtcggcgaaggtgccccagtagtgcatgtacagcgccacggcggtgatgtcgacgatgccggtcattgcccagttgaggaaatacatccagccggcgacgtaagaggctttttcaccgaggaattcgcgggcgtaagaaacgaagctgccgctggaagggcgatgcagcaccagttcgcccagcgcgcgcaggatgaagaaagagaagatcccgcacaccagatagaccagcgccagcgccggcccggccaactcgagacggccgccggtaccgaggaacaagccggtgccgatggagccgccgatggcgatcatttggatttgccggttgcccatgcttttgtgataaccggattcatgagagtctagccagcgtcttctggcggcgtgtttgtcatccgccgactttttttgtgagtgcattatccgtcctgtttacctgtctatgttaaccctgctcttaccgagagcaaacgattgctatgaccaatcgtcatgagaatgaggtcgtggcatcattccgctgtttattgtgtatacagccatcattaaaataacggcgaagcatgctaccttttctccgtaatggtggcaaaaaatactgcgcataaaacgtgaacaagtgtgtttattttttaatccaaatataaaagaatatattattcaaaaagatgtgatgttttatcaagacggaaatatcgaggaataaaaagtgattaaaatcacaaaataataattaccgtgcaaattacagggtgttgttcttatatttcgcggtgagaaataaggggggaaggaaatggcgacccgcgcagaaaatgggataaagcagcgggtcggttggcgcgtaacgagtcttaggccgattcaccggccggcagtgccgatgcgggcagaccgaacagcttgtcgaatgcccagttaaacaggaaggtgtagcaaggaatgatgacgatcagcgccatatccagcagcagcgcctgccacagcgtgatgcccatccaccaggcgatcagcgggatcagatacaccaccagcgttagctgaaagccgacggcgtgcaaaatgcggcgtttgagcgtgcgggtgcgcgacacctggcggctttcccaccactcgaataaatagttgtaaataaagttccagctgaccgcgatggtggtgatcaccaccgccagcggcccggtgctgctcggcgcatggcccgacagcagcgccagccccagcgccgagatcgccatgccgatgatttcataagcggtgacatacaccagtttgcgtttgacgccttgcatcgttttctcccgatctgtttttagttgcctctgtggcgacggcggttaagataacgtcaatcacattgatagaaaaagtcaggagttgtcagttaatctgacaggttgaacaatgaatttctccagcgacaatatcgaactgtttttggcggtgctcgatcgcggctcgttttccgccgccgcccgcgcgctgcggcgcgtgccctccgccgtcagcatggccatcgccaacatggaggcggagctcggtttcgccttgttcgaccgttctcaccgtgaaccgacgccgaccgcgctggcgttggccctggcgccgcacgcccgcctgatcgccgggcagctcaagcagctgcaggtgcacgccatcgaactgtctcaggggctggagagtcggctttcgatcggcgtggcgtcggatatcaacggcgccggcctgctggcggcggtgaaaacgctgtcgcagcgttatccgctgctgaacatcgaagtgctcagcgcgccgcaggacgacgtgctgcacatgctgcacgaggggcgcatcggtgtttgtctggcgttcggcgggctgaacgtcaatagcgcggagcagttccacttcgtcggcgcggagtcgctggtggcgatgctgtcgccgcagcacccggcgctggacggcgcggcgggtgagctgtttctcgaggatctggtcaacgtgcggcagatcatggtggccagccgcgatctgccgatcggcgatctgcgtccgcaggtggcggaggcgtactggcgcaccgacagcctgccgatggcgctgaacatggtggaggcgggcctgggctggggcaacttcccgctgtcgctggccgagccgctgctggcgcaggggcgtctggtgcggctgaaattcaaaaacaccaagaacgagctgcgcttgccgatgcatttgatctggctgaagaatcgcccgttggacaaggcggcgcgcgagctggtcgagctgatgcgcgcggcgccgcaggaaagctgacgcccgctgcgtttgcttactccgggtggcgtttacgccaccagaagcgcaccagcagaatggcggcgatcgccagcgcgacaaacagcaggctggagagctttttgtcgaagccggtaacgaagcgttcgatcgcctggccgccaaaataaccgagcatgacgaagatcgtcgcccataaaatggcgccgaggatattgagcggcacgaagcgcgacggcggcaggcggctggcgccgatcaacaccgggccgatgatgcggaaaccgtacatgaaacgcaccccgataacgaacagcatcgggtggcgggcgatcagccttctggcgcgcgcgatgcgcttttcctgtcccttgagccgcgagatgacgcggccttcaaaccggcggccggcgaagtacagcagttggtctcccatcatgccgcccagcgccaccactgcgatcacccacggccagtgcaacagcccttcatgggcggcgatgccgcccagcagcgtgatggtttccccttccgccaggcagccgataaacaacgcccagtagccatagtccgtaatgtagtgggccaaatctgtcattccttactccttatgtggctgacgcataagggcaagtatacgcccgattgctaaccttgggcgatctgggccaccaacgctctgcgccgctgaaggctctccgccatctgcgcctgtaccctggcgtaaatgtgcggcggggccaattccggcgtgccgccctcgaacggcggtgccggggcgtattccagatagagctggatcatttgggcggtgtcttcgccgtgcagttcggcgatcagcgccagcgcgaaatcgatgccggcggtaacgccgccgccgctgatcacgttgccgtcgcgctctacgcgtgcagcgctgggtatggcgccgaacagcttcaggctgtcgcgcatcgaccagtggcaggcggcgcgtttgcccggcagcaggccggcggcggccaggatcagcgaaccggtgcataccgaagtcagatagcgggcatcggcgcccagccgccggatttgctgcatgaatgctttatcctgcagcgcctgggtgcagccgctgccgcccggcacgcacagcacatcgcagcgtgcgatctccggcagcgggcgcagctgggtgaagtgcaagccttccgactcgacatccgcgccgtctactgaagcgacgatgatttccgcgcccggcatgcggcgcagaaactgcagtgggccagtgaaatcgagctgggtgacgccttgatagatgggaaatacaatcacgagtggttcagacatgacattcgcctcatttttatcgttggacctgggccataatagccgccctgcatttggctgatatgacagataaccctcaaaaagcgccatcatgaaaacgatcggttttgtggtttttcccggtttcaacctgctggactttgccggcccgctggcggcgttcgataacgtcaaccagttcactgacccgccggcctaccgctgcgtggcgatctcgccgcagggcggtatggtcgccagctcggccggggtggaaatcgccacgcagccgtgcggcgacgagcgtttcgatacgttggtagtggccggcggcagcggcaacgtgatggcggcgcagtcaccggcgctggtggcgttcctggccaaccaaagccgacgagcgcggcgtatcgccagcgtatgcaccggggcgtttattctggcggcctgcgggctgctggacggcaaacgcgccaccactcactggtatcatgcggcgcggttgcagcagagttatccgcgtatccgcgtcgacagcaaccgcattttcatccgcgacggcgatatctggacctcggcgggcatcagcgccggcatcgatctggcgctggcgctgatcgaggacgatctgggcgccaccctggcggcggccgtggcgcggcagctggtggtctatcaccgccgccccggcgggcagtcgcagtactcgctgctgctggcgttgaacccgtcgtcggatcgcatgcgcgccgcgctgtcgtacgcgcgtgaacatttgcaccagccgctgtcggtggcggatctggccgacgccgcctgcctgagcgagcggcaattcggccggctgttccgcgctgaaaccgggcagacgccggccaaggtggtcgagcaattgcgggtagaggcggccagggtgcgcatcgaagagagcgccgagccgctggaagcgatcgcccgctcggtggggttcagcgatccggaacgcatgaggcgggcgtttatccgcgtatttggcctgtcgccgcaggcgatccgccggctcggccgcgcgggataacttttttgccacgcctggcggcggggtacaccagaggagcaacggatgtatcaggattttgacagtgaattgagctgggcgatgcgtcatatgccgcgcacccgggcggcggtggcggcgttgccggacctgtacggggtgcggctggcgtgcaatatgcacctggatctgaaaatggcgccgctggtggccggcctgctggacaagggcgcggcgatctttctgaccacctgcaatcccactacggtgcaggacgacgtggtggcctggctggaacggcggggcgcgcaggcctatgcctggcgtgacatgagcgccggcgaatggtcggaatctttcgatcgcgcgttggcctggcagccgacccacctgtgcgaaatgggagcggatttgaccacccgtttgcaccaatcgccgaacggcccgcagatcgtcgccgggctggaggccaccggatcgggcatcaatcggttaaacggcgtggcgccgcgctacccgatcttcaactgggacgatctgccggtgaaagaagggctgcacaatcggcatatggttgggctgaccgcctggcacaccttcttccagaccacccatttgacgctgcatgaaaagcgcgtgctggtgattggctacggcctggtcgggcaggggacggcggccgcggccagggcctacggcggccaggtgatggtggcggaaatcgatccggcgcgtgcgctgcaggcgcgttatgacggctggcaggtggtggatctggcgagcggggtcgcgcaggcggacgtgatcgccaccgcgaccggcgcgaaaaacgtgctttcggcgcagcatctgcaacaggcgcaggacggcgtatttattctcaacgtcggccacgtggcggaagagatcgacgtcggcttcctcaagggcctgcagcaccacgagccgatgcattatgtgaacgcttaccaactcaatgagaagacggtttatttgctggccaacggctcgatgttcaacctgaccgccggctacggcgacagcctcaacgccttcgacgtcacgctggcggtgatggcggccggcatcggccatatcgtcggtgcaggggcgcggcaaacgccggggttgtacctgttgccgcagtcggcctggcagccggcgctgtaactttttctacgcgggcgttcatcccagagcgcccgcgggctgtgccgattttcggccgacagaatttgtcacaaatccgccctataatcccagtgccaagcgctgaaccctcacatataattcgctgagttcaagcccccatttcagagtaatgcctgtgaaaatacgtgttttggttctgaccctgctcgctttgcaggcgggcgcaggctttgcgccgcgcgcgctggccagcgacaacgctgccgccctgcacgccacccagcctgagctggcctccggcagcgcgatggtcgtcgatatgcaaacccataaggtgatgtacgcgcgcaacccggatgaagtggtgccgatcgcctcgatcaccaagctgatgaccgccatggtcacgttggacgcgcacctgccgctcgacgagatgctgtcggtggacatccaccagacgccggagatgaaaggggtgtattcacgggtgcggctgaacagcgaaatcagccgcaaggatatgctgctgctggcgctgatgtcgtcggaaaaccgcgcggccgccagcctggcgcaccactatccggggggctacaacgccttcatcaaagcgatgaacgccaaggccagggcgctgggtatgaccaacacccattacgtggaaccgaccgggctctctattcataacgtgtcgacggcgcgcgatctgaccaaactgctgatcgccaccaagcaatatccgttgatcggccagctcagcaccaccaccgagcgcatggccagcttcaaggatccgaactacacgctgccgttccgcaacaccaaccatctggtgtacaacccgaaatggaacattcagctgaccaagaccggcttcaccaaccaggcgggccactgcctggcgatgcgcaccatgatcggcaaccgctcggtgtcgctggtggtgctggacgcttttggcaaatatacccacttcgccgacgccaaccgtctgcgcagttggattgaaaccggcaaggtgacgccgatcccggccgccgcgcgtgactatcgccgccaaaaagacgcccgtctggcgaagaacgacagcgaataacccgcctggcggtccgcccgtttgcggcgggccgctatcggccctcgggccgtctgatgacaaatccccgctcgcgatcgccgtcgaaacccgctttgagataaagctggtgcgcgccggtgcgttgctgccccgacagcagcatcaccttgtaacagcctttacgccaggccagctgcagcgcatattcgaccatcgcgagcgccacgccgtggccgcggtagggctccgccgtcaccacgtgttcgatgacgccgaacggctgcgcctggtgcgccagccccgggatcagcgccagcatgcaggtggcgatcggctgttcctcgtccgccgccaccaccaggcggatcgccggatcgtccagcaggcgttgcagggcgcggcgcgcgtcgtcggcgcgcagcggcgcgtcctgcgggcgcagctcgcgatacaaggctaacaggccgttgagatcgtccggctgcgccaggcgatgaatgatgctcatgattgctcctttccgccgcttcaacggtaatccgctatcctccattaataccacaacgattgtcggaggggatgttatgagtcaggtttcgacctttgtcatgttccagggagaggcccagcgggcgatcgacctttacagccaggtgttcgagcgttttcggctcatgcaggtgcagcattacgatccgacgccggacggccggcggttgatcaagcatgcgtccatcgatttcgaccggcagaacctggtgttcatcgacagcccgatcagccatgacttcagcttcaccccggcggtgtcgctgttcatcaacctgcctaacgaagaagcgttggagcgggcgttccaccggctggcggaaggcggcaaggtgctgatgccgctcgatgactacggcttcagcgcccggttcggttggctgaacgatcgtttcggcctctcttggcagctcaatgtgccggcgggcgatctgccctgacgccaagggcgtgcaaaagggatggtagcgcctgcggttgtttcatatgcttacccccgtggtggcagggagttctgccgtgggcaataccgacaacatcatggaaaggtgcgctttgattgattttgaccgctatgttgagcaagcgaagtcttacggcgagtggtcgggcgggcatgtggagatgtcgtccggtcgcgttgagggattgagctatcgcctgtatcggcaaactgccgcgaatgaagacgtgatggtggtgtatcacggcggcggggttaacagcgccgccgggtatgacgtcctggcgcgccagctggcggccgagccaacgctcgcggtgtgcctggtggatatccgcggacatggcgattccgcgggagagcgggggacggttgagcggcctgagcgtatttggcgcgatgtcgatgtcatcctggcggaaatgcgccgccggtttccgttggcgcgcaggcacctgctgggccattcgagcggcgccgggatgttgctcaactacctgacccgctatccttgcgagcagcaggcggatagcctgatcctgctggcgccggagctggggccattttccgggatggcccgcgatctggcggcggcggcccgttttgctcaggtgcgccaatggccctttgtggccaatgcgctcagcggtgggcgatggttcgggcaatctcgggcggtcagcctgaattttcccccggccgtactggccgcctcccccgattttatctgccaatacagcgttaatatggctaacgccttgacgcctcgcgccccggccaagcaactggcggcgctgcgattgccaaccttactgctggcggccgcgcaggacgagttgttcaatgcgcaagcgatgcagcgtttcgttgaacagcatggcagcgtgcatgtggcatttggtttgcttgaggggagtacgcatttatcgtgcgtctttgatgcccatcgccttgtccttcaacatatctcgcgtgtgtccgctatcggatccgatgaggggctggcgggcgagggggcttaacgtccacccggcgttttccgcgatcctcccatatccttttatgacgctttaccgctatgctaaacatagaatggcccgtgaatatgaaaaggatgaatcattttggcaggaagtagtttacttacccttatcgacgacatcgcctcattgctggacgatgtctctttaatgagcaagatggcggcgaaaaaaaccgccggggtgttgggggacgatctggcgctcaacgcgcagcaggtcaccggcgttaaagccgaccgcgagctgccggtggtgtggagcgtcgctaaaggctcgctgatcaacaaggcgatcctggtgccgttggcgctcttgatcagcgccttcgcgccctgggcgattacgccgctgctgatggtgggcggcgcctacctgtgttacgaagggttcgaaaaggtgtttcacagcctgagccacggcaaggcggcacaggaggaaaaatcggacgggcccggcgccaatgaggatgccgcagcctatgagaagcgcaaggtgaaaggggcgatacgcaccgattttgtgctgtccgccgagattatcgccatcaccttgggcacggtcgccggcgccaccttcagccagcaggtgatcgtcttgtgcggcatcgccgtcgtgatgacgctcggtgtgtacggcattgtcgccggcatcgtcaggctggacgatctggggctgtacctgagccgcaaaggcagcgcgttggcgcgcgccatcggcagcggcatcgtgcgcgccgcgccttatctgatgaaaacgctgtcgatcgtcggcactgtcgccatgtttatggtcggcggcggtattctgacccacggtctgccgccggtgcatcacctgttcgaagattgggcctcgtacaccaccgtggtgccgacgtttggccatcttttgcagggtgtggttccggccctgctgaacgtggcgttcgggctggtggccggcggcgtggtgctggcggtggtatcggcgctgggggcggtacgcgcgcgtttcaaggcatgatgaaaagtctcgccccggaaggggcgggacgtattaagcgcattaaaagatcagtttgagaacgccggtaatcgtcaacaaacccacgataaagatgatggcgactatccacagaataattttcatttgattctcccttaccggttaaaggtggcgtgcgattggcgctaactcaatgaaatcactcttcactatagacgctaactccttatcgtgcgtcgccatgccttcaaggatgctgattgtcgcccgcgcccagcgcgcgctgcatgatgtgggtgtcgcgccattcccccagcttgaatcccacggcctttaacgtcccgacgctggtaaagccgagcgactggtgcagcgccagcgagccgcggttggcggcggaatcaccgacgatcgccagcatctggcgccaggggccttgctcgcagcgggcgatcagtgcgctcagcagcgccttgccgacgcctttgccctgctgcccttcggcgatgtacaccgagtcttccacggtaaagcggtaagccggccgggggcgatacggcgtggcatagcagtagcccacaatacggccttcacttttcgccaccagccagggcagtccggctgcttgcaccttggccagccgcagctgcatttccgcccgcgtcggcggttgttcttcaaacgaggcggctccgtgcagcacgtggtgggtgtaaatacgctgcacggcggccatatcgtccggcgtggcgtcaaggaggctgagtacgggagcggagagcgtcatggcgggtctgtttaccttgaaaatcagtggataaacgccattatgcgcgccgcttgccgccggggtaaatcgggttttcttatggtgagataagaaaaccctatggggtcgtcaaccgcgcatcagccgggtcacggcctggcgcagataggccagcagcggcggagtcagccaggtgccctcggtcagcgagggttcccgttccatcgcttcgcggatcttcatttgcgtcgccgggttggtgcctgcataggattggaacagcgccagccaactggccgccaatcgcactgcctccggcgaatcggacggtatgccgtcgttcatcgcttgatggaattgagcgatcagagccggccactcctgcaggcgggtgaaatagtgttgacgcacataggcgtactcttccgccgacaggtatttttgatagacagccagcttggtttcggcaaaggcgcgggtgatgtagtccgtcatcgtcggtgtaatgccggtctgttcgcgcatcgacggttcgtcggcgtgcatggcgttcagccgggtgagaaaggccgggttgccggcggtgtcgcgctccagcatcagcatccagcggcgcgccagcgcctgtgcctgtggcgcctgaggttcgacgccttccgccatcagttgtcccacgctgctcaccaatgcagcccattcctgattgcgggtgggatcggcctggtagaacggcagttgcgccagctcatcggcggtaaagtatttatcgtacatggtcattaactccaacgtagttagccagtcgttcagttctggttcgtgcccggcggagagttgggcatgcatgtattgcagccggccgcgcaatgcggcgatctgtgccaactgctggtccaacatggcgatctgctgctcaatcaccgccggaagcgccagccctgaacgcgccagaattgccccgacttccgccagcgaaacgcccatccggcgcagcgcctggatgtggtgcaagcgggtgatgtcagcccggttgtataaacgataaccggcgtcggaacgcgcagaagggaccagcaagccaatgctgtcgtagtgatgcagtgtgcgaacggtaatgccggaacggcgcgccagttcgccgactttcaataacatatgtagctcctcccttgtgcgtgccaggatactaaagcctgacgccacgtaagggtcaagagcgggaagaaaagatgacgttttaaaaatcggtgggcgcttgataggcaaaagcccagctggatggctgggcttcgcaggtccctgaaagggagggtatagcataagggcctttatcggctacggcgacaatttcacctgatttgtctgttttgtcaacaacagcgtactggtcagaacagcatatttttggcattgatcgacttaatgacggcgcgttgtatgtcagcaacaagctcgcgcgacagacactgggtaagaaagcctctctctttacgggctctgttcagccgttggcggctgacttgctgcaccagatcgccctttgcccagcgggtttgcggatgaaagaatctcatatcttcgatgagttcacgcgtaatttcgatgtgcaatccccgttcgatcttgttcgaatctctggtggtcgacagcggtacgataatgcaggcgttgccgttaattttgccatttaacacaacaactaaacggttcttcaccatttctggtggaatgtggccatcataaaagccggcttcatgcggttggcagactgataggggatagttgccatagttgcactcaagaatttccccgaccttgggggcaaatttgatcggcatcgagacactcctttgttgtgaacaatccgtgttatggaggaatgagcatgcgggcgttttgcttttagagaaaggtgtggcgtaaggaaacggggaatgaaagtgaaatattgcggattcgtacgcagaatccgccttgatggtggccgaatttaccagcctttcaccgcgccgccgttgaagattttttcggcggctttggccacttcatccgactcataggccttgatgaagttctgcacgttcggcgcgtccttgttgtcttcgcgggtgacgatgatgttggtgtacggcgagtctttatcctcgatgaagatgccgtctttggtcggcgacaggccagtctggttgatgtaggtggtgctgatgacggcgacggtgactttcggatcgtccagcacatgcggcaactgcgcgccttccagctccatgatctgataacgatgcgggttggcgctgatgtccagcgcggtaggcagcagccccttaccaggcttcaggctaatcagcccggttttttccagcagcagcagggcgcgccccaggttggtcggatcgagcgggatggcgatcaccgcgccgtccggcagctctttcagcgattttatctttttggagtagccggccatcgggaagacgaaggtattgccgaccgccaccagcttatagccgtgatctttgttttgctgttcgaggaatgggcggtgttggaacacgttggcgtccagttcgcccttgtcggtggcgtcgttcggcagcagcgagccgctgaagccgaccagctcgacgtccagcccgtatttctctttcgccacctgcctggcgacttccgccacgtcctgttccgcgccgttgatgacgccgactttgatatggttttggtcggttttttgatcgcagccctgtagcgccaatacggcggcgaaggccgccgccagaggggtgatacgccagcgtaaggtcatcgaactctccctgaaaagaacaataaaatcagttggtttttgttcttacagctaagcctgaaccgccgatgaagtcaaacgctcgttcagcataaacggctatagcttatagccgttatgcagcggggagttatcggctgagcgaacgcagcacgacgatgcccggcgtagccatcacgtaatccataaagggcgaatcgaccacccgcatgttggctttgcgcgaagaggcgttgcgcagcaccgggccgttgtcggtcatcacgaagatgccggtgtgggtcacgtccagcccggcgaggttggtgtaaatgccgatgtagtcgccggtgcgcagttgggccagcaccttgtcgtcgacgcggtcgctgggaatgtaggtcacgctgcgctgcacgacgggcaagccgggcaggtagctgccgccgtcggctttctgattgaggtttttcacgaggctgacggcgtgtgggctgagctgggcggtgatgtcttcggccacctggtgcggccgttgcacccagtcggtgaagaagtgtttgcgctgcgggaaggcgattttgccgtcgacatagcggatgtccactaggcgctgaacgaactcggtctcgctgcgggcggtgctgagtgcttccacataatcgatgtaggtgaagcaatccagcccgcggaagtcgatcaccagttgctcgggcgtgctctgcgagccgatcaggcgattggcgaggtagggggtgccgagaaactcgcgcgaaatcaaatcgacggtgcggccatgtggctgcgcggcgggccaaccggcgcgcagcgtgaggatctcacgcagcttgctgcgggtgctggcgtccatctccggctgcacgctcggcggcgcaacggcggcgtcggtcggcggcgttgccggggtggggcgctcggcgcatccgctcatggcgatagctaacatcagtaaaacaaccttgttctggttcatacggccctccatgggtgtcgctggcttatcagagtaagtgataacagttctcatccgatggtaggggttaaaaagtaaacatagcctcaatggcaatcgataaatcagtaaccgatttcgctattgaacggcaaataccagaacagcgcgatttcgtgatcggcgatctccggctcggcgcggtacagcaaacgatcgatgccgccgagaataaacccgtaatgctggtagcagcggcaggccgccagattgttgttctgcgtttcgagcatcatacccgaggtttcctgctgccgcgcccactgtttggcgcagtccagcagcgccccggcgatgccctggcggcgcgcgtcagcgctgaccgcgatctcgtcgatcagggtgtagccgttccagtttttgctcagcgtgatgtggccaacggcgtcgtcctggcgatacgccaggaaggtcacgctgtcttcgttggcgaacggcgccagcggatactgcttgcgaaacggcgccaccgggcgggttggccagctgtcgaccgggctgtcgaactgcggcagggcgtaacaggcgatggtaaagccgaaatcgccgcgcgtcaggtaatcatcgggcagcgcctcaatggccgcgatgcggatggccgggatcattacggaagctcccgcagcaggcgcgccggattgccggcataaatccccttgcgggtgatgtcgcgggtcacgaccgccccggcgccgattaccgtgtcgctgcagatctccaccgccaggatcgtggcgccggagccgatggacacccgatcgccgatgcaggtgcgcctccagctggccggatcggcattgggcgcgccgtctttgaacagatcgttggcgaaggtgacgccgtggccgacaaagcacgcttcgccgagggtgacgtattcgcagataaagctgtgcgattgaattttactgcgcgcgccgatgctgacgtggcgctggatctcgacgaacgggccgacgaagacatcgtcaccgagccggcaaccgtacagattgcagggttcgatcacggtaacgttgcgcccggcttcgacgtcgacgatccccgcctggcgggtggtgataacggatgacatgaccttcctcacagcctggttttcatggtgggagtataagacaaagcgccgcggcgttgcgctttccgcacgttttttcgccgaaagactataatgagtacaggggagagagccccgtggccgcaatcctcgcacgggtagcagtccgtcagaggtgtgaaattcgttcgccgatcgcggcctacggcgagattggaggtgtctcatggtcagtcatgtttggggacttctggcgcatcccagcgccgagttcgaacagatcaaaagcgagaatgaaagcgtctcgcacctatacacccatcacgtgttgctcttggcagccatcccggtggtctgcgcctttatcggcaccacccagttgggctggctctccggcgagggacatgccatcaggctcgacatgtttaccgcgctttataccgccgtggcgttctacctgctgatgctggcgggcgtagcggccatggggaaagtcattcactggatggcgcggcgctatgaatcgcgccccagcctgcaccgctgcatggtgttcgccggctacgtggcgaccccgatgttcctcagcgggattgtggcgctctatccggtcgtctggctgtgtctgtttgtcggcattatcggcctgtgctattcgggctatctgctgaatctggggatcccgcacttcctgaatatcgacagtaaggaagggttcatcttctccagctcgaccttcgctatcggcatcctgttgctcgagctgctgcttggggtgacggtgctgctgtgggggtacggttcctggttattctgagttaacggctgttgttgtcgcccccgcgccggtggaacggcgcgggggcttttgcttttatgcgcggcggaaaaccagcatcacgccgagcacgatgcccgccatccccaacaggctcagcgcggccagcgcgtggccgagcagcagataatccagcagggcggtcaccgccgggatcagatagaacaggctggtgacctgcaccaggttgccgcgctggatcaggcgatacagcaagaacgtcgccagcaccgagatcaccaccgccatccacagcagcggcagcacgaactcaggccgccagtcgacccgcagcggctcaaacggcagcgccagcgtacacatcaatagcccgatggcatactgcagcggcaagaccgccagcggcggctgcgtcatgcccttttgcagcagggtaccggcggtcatgctccccaatgcgataaaggcgaacagcatgccgctcggcgagaaatgagccaccatcaggctttggtacaccaccagcgtcagcccggccatcgccagcgccagcccgaatgcgcgcagcccggtgcagcgccgttcggtgatgaactgggtgaggatcggctgtacgccgagtaatgtggccagcacgccgggcgtaatgccctgttccaacgccagcagatagcagatctgatagctgccgatcatcaacacgccgatcagcgcgacgcgccggcgggtgccgggggcgggcaggcactggcgccgccacaggccgatggccaacagcaccgccagcgcgatggcgcagcggaagaacagaaaagcgaaggcggaggcgtgctccaatccccaacgggagaagatcgcgccgctgctccagagcaggacgaacagcgtagccaggccggcattggcccagagagaaggtaatcgcatatcaatttcacctgtcgtgaaaattacaggctccggcgcgcgcggcggtctacgcctgaacgcaacagatcactaagccggaggtaaaaagtcggtttggcttaacgcacaaccacaaggcgtggcgggtaagcggcaaccgcagaaacgacagaagaaacggcgggtggggcggaggaagcacacagcaaaacgacggccggaacggtcgcgtttgtcggatctgtactgtgcgccagataggtcatgtgagttcctgaaaatcgggaatgagacgaatcgcatcaaacataaccaagttcagcggggcgtgcaatcggaaatcacagagattttcatgataatgaaaatcattatcatctgtaaaaaggtgtgctatgttgctttaaccacgccgttttgaagcagggcgcggcttgccctctgccttgcttcacgcagcgcgtgcggcataagaatttgcgattcgcttttgcagaaggcgagcaatcgtggtaaaaacactgatatgttataatataacaatttatgcatgatgaattcagctcacgacatcctccatgttgatggagttagcctgaccggacacggcggggcattgatactcgacaacatccatttcgcgctccgcgccggtgagaagctggcggtgattggccccaacggcagcggcaagtccagcctgttgcgcaccctgatcggcgaaacgcgggcggacagcggcggcatttactggcgagggcgcgccttgtccgcgtggccggcggcggagcgcgccagaagcatcgcctttctggcgcaaaacgatctgccggatttgcggctttcggttgaggattacgtggcgttgggccgtttaccgcatggcgaacgctctgcgacgggaaagcgcatcgttgatgaggccatcggggaaaccgggctggcgccgttcaggcgccacccgttagggcggctctcgggcggccagcgtcagcgcgccgcactggcccgggcgttggcgcagtctcccgacctgttgttgctggatgaaccgaccaatcacctcgatccgcccgggcgctcggcgctgttgtcgttagtgaaaaataaagatattgccgtgattgcggtgctgcacgatttgcccgtggcggaggcgtttgccgatcggatcctggtgctcaacgaaagccgccaggtagcctgtggtacgcccgaggcggtgttgcagaccccggttattctgccggtgttcggcatgaacagtttcaaggtggcgcaccccgtcagcgggaaaacgctgcgtatttttgacgttccccattgtgcttgataaaccagagagaaatatgaacacacgcgtattccccctgctcctgctgctggccggtggggtggcggcggccgaaaaatttcccgtcaccgtagacagctgcggttcgccgatcgccttcaaccaggcgcctcaacgcgccgtcatcaacgacatcaacatggccgagatggcttttgcgctccatctgcaggatcgcattgtcgggctgaccggtatcaccggctggtacaaactgacgcccgacttcaaggcggcgatgggtgccattcccgaactggcgccgaaatatcccgctttggaaacgttgctggctgcgcagccggatttcttcttcgccggctggaattacggcatgaagatcggcggcgacgtcacgccggagaagctcgccccgttcggcatcaaaacgctggtgttgagcgagagctgcgtgcaggccggcgggcggccgcagaaggccgatatgaacctgctgtatgacgatgagctgaagctcggcaagattttcggcaagccgcaagaggccgccgcgctggttgaaggctggcggcgccggttggctgcgcttcccgccagaccggcgggtcagccaccgctcaaggtgttcgtctatgactcgggggaggagaagccttttaccagcggcaaatacgccatgccgacggcgatcatcgaagcggcgggcggccgcaacgtgatggacgatttaccggcgagctggacgacggcgtcctgggaggcggtggcggcggccgagcccgacttcatcattctgctggattaccagaccggttcgggggccgatgcgctgcggcgtttcctcgagtctcacccgttgatgaaattgacccccgcggtacggcaccaccgttatctgaaactgcagtatgcggagctgacgccggggccggccaacatcggcgcggtggaaaagctggcgcgggcgctgtacgcgccggaggctgaatgaactcgccgacccggcgatttatgctgctcgcgccgctggcgctgtcggtattgtgtgggctaatgatctggagcctgcagctgggcagtgtcgcgctgtcatggcggcaggcgttggcggcgttagggctcggttcggcgcccctctccggcatgctggataccatcgtcgtgcaactgcgaatgcccagagccctgttggcggcgttgaccggcgccgggctggcgatgaccggcgcgttgctgcagactaccacccgcaatgagctggccgatccttttctgtttgggctctcctccggcgcctccgccggcgcggtgctggtcatcacgcgcttcggcgatgcgctgggcgcgctgacgttgccgctgtccgctttcgccggcggcattttgtccgcgatggcggtgatgatcctgtttcgcgtcagccgggtcaggcgcgccgagcagctgatcgtctgcggcctggcggtctcgtttttgttcagcgcgctcaccagctacctggtgttttccggcgatcagcgggcggccggctcggtgttgttctggtcgctgggcgggctggggctggcgcgttgggataatctgttcattccgttggcgagtttcgtgctgctggccgggtttacggcgctgcgttggcgggcgctggacgcgctgctggcgggcgagcacaccgcccattcgatgggggtcaacgtcgcgcgcctgcgcaccgagacctttctgtgctgcgcactgtccacggcgtttctcgtttcgctgacgggcgtgatcggttttgtcgggctgatggtgccttatctggcacggcgcctggtgggcgtgcgccaccgcttgtccgtgccgatgtgcggcctgctgggggcgatgctgctgaccggcggcgacatgctcagccgcagcctgatccccaatcaggagctgcccatcggcatcattacggcggggctggggggcgcgttcatcgtctccttgctgctgcgtgcggaacgctgaatgggccattgaaggtcaacaggaaggtgaggtggcccgcctcggcaggccaatcgggcgctcttagcgggggtcttcggcccagcctttgcgtttgctggttttgccgatgccggggttgaagctgttggtcggatcggcagtgcggtagaacgcctgcagatccggtttggcatggtacaggtggccgacgttatgctccgccgggtactcggcgccgcgccggttgaggatctcgagcatcttttctttcagcgcatggctgtccacgccttttttcaccacgtagtcctggtggaagacgtggcacataaagtggccgtaatacagcttatgcaccaactgactgtcgatctccggcggcagcgtttcgaaccagtcggtgtcgttgcggcgcagggcgatgtccagcgccagaatatcctccaccttgtcggcgtgcaccgcgtggtagcgcaccgcggcgccggcggcggcgaagcggtgcaggaaagcctttttgccttcgtcaggggtgcaggcgaagaaggcgccttcggcctgggcgaaatagtcggtcaggtagcgctgcgcttcgtcgacgccggggccggccatcttcagcagcaggtggtgttcgaaacgttcgcggtattccttcatgcgcttcggcaggtggctcggcgccagatggctcaggccctgcatcagccgatcggtcaggttgtgcggcagcagcggcagcttgttgaggctggcgtccatgcggcctttcagggtgaagaagcgcggcatctgatcggtgccgagcttgtcgatcatcatgaaggtgtctttgccgtacacctcggcgatgtcgaagatatcgcggtgcatgtattcaccggccaccggcaggttttcgaatttgctcagcatgtggcggcgcagttcggtcagcaccgcggtgtcgttggtgccgatatagaacacctgctctttgccctctttctcgaaggtgtcaagccgcaccgcgaacactgccagcttgccggcgcagccggaagcttcgtacaggcggcgtttgtcggcgttgaagcgggaaggggtgtcggcatcgacgtcgcgcacccggctggcgtattcgttatccgaggcgcgcagctcaccgtattcgacgtcctccgggcgatagtcgcctttttccagccgggtgaggatctcttccggcgtgtcgccaagccggatgcccagatggttcaccaggcgcagctggccgtcttcccctagctgggcgtacagcgccatttcggtataggccgggccgcgtttcaccagcgagccgccggagttgttgcacacgccgccaatcaccgaggcgccgatgcaggaagagccgatcaccgaatgcggttcgcggccgtagggtttgagcaatttctcgaggtggtgcagggtgctgccgggaaaaccgaccacctgcttgccgttgtccagcacctgaatatggtcgaggcgcagggtgctgacgatgacgatatcacggtcatagtcgttgccgctgggggttgagccttcggtcaggccggtattggcggcctgcatgatgacgattttgtcggcggccacgcaggcctgcagaatgcgccacagctgcagcaggctggtgggaaacaccaccgccagcgcctggccttcgccggagcggaagcccttgcgataacgctcggtgttgcgatcgccggtcaacagctgcgggccgccgacgatgtccttgagctgattgataaacgtctgattgcctgactgcatgctgcctgtctccctgtcatccccgtcgccttaaccgcggcgccggggtgccgcgcaataagctaagaggttatcaattaaataacttattaagctatcagcttggtgggctaatggcttgcgggtttagtagcgctcggcgtagccggcctggcgctcttcgtcgcgcagcgtcaggatctccacgccgtcggcggtgaccgccacggtgtgctcccactgcgccgacagttttttgtcgcgcgtcaccaccgtccagccgtctttcttctgcttgatgcggcggtcgccctggttgatcatcggctcgatggtgaataccatgccttcctgcagcgccatgccgctgccgggttgaccgtagtgcaataccgccggctcttcgtgcatgtcgcggccgatgccgtggccgcaatactcccgcacgatgctgtagccggcctgctcggcgtgccgctggatggcgtggccgatatcgcccagggtggcgcccggtttgaccgcgcgaatgccctgccacatcgattcatagacgttgttcaccagccgtttggccagcggcgtcacctggccgatgcagtacatcttgctggagtcggcgatgtagccgccgttttccagcgtgatgtccacgttgactatcatgccggaacgcaggattttgctggccgacggcacgccgtggcacaccacgtcgtccacggaggtgttgagcacaaaggggaaatcatactgccccttgctggccgggcgcgacttcagctcttcgacgataaacgcctcggcgcggtcgttgatctccatggtggagatgccttcgacgatgacctcatcgagcatagcaaacactttagccaacagagcgccggaatggcgcattttggcaatctcttccggcgttttaatcacaatctgtttcacccgacaatctccttcagcgtcagcgcgttatctttcatcattttttttaccagctgcgggtaggtcagttccggatggaactccgccagcatgccgatcttgatccagtactcggcctgcgcgttgatcgaacgcgtcatagtcaggctggcgaggcgcagatcgtcatgcagcgcgtccgaaatttttacgatgcccatcggcgtctccataaattaacaatatacgaagtgtatacgttttggatggtcgcgatgtggcattctgtggcgtaagaagattctggcaacaacgattgccgccgccaggcaatgcgtttattgtgataaacgacttttttgccatgatttttcagaaggatttaaggcgtgactaaactacgtgttggggtgatttttggcggtaaatcggcggagcatgaggtgtcgctgcagtcggccaaaaacattgtggatgcaatcgacaaagagaagtttgacgtcacgctgctggggatcgacaaacaggggcagtggcacatcaacgacgcctccaactatctgctcaatgccgagaacccggcgctgatcgcgctgaaccgctcgaacaagaacgtggcgctgatcccgggccaggaaaagcagcagctgatcgaagcgggcagcgccggcgcgctggggcagctcgacgtcatcttcccgatcgtgcacggcacgctgggagaggacggctcgctgcaggggctgctgcgcatggccaatatgccgttcgtcggcgccggagtgctcggctcggcggtcagcatggataaagacgtgaccaaacgcctgctgcgcgacgccgggctggcggtggcgccgttcgtcaccctgacgcgcgccaaccgcgccgggttcacgtttgagcaactgagcgagcgcctcggcctgccgctgttcgtcaaaccggccaaccagggctcgtcggtcggggtcagcaaggtggaaaaccgcgccgagtttgacgcggcggtggcgctggccttcagtttcgatcacaaagtgctggtggagtcggcgatcgtcggccgcgagatcgagtgtgcggtgctgggcaacgacgatccgcaggccagcgtatgcggcgagatcgtgctgagcgacgccttctactcctacgacaccaaatacatcaatgagcagggcgctcaggtggtggtgccggcggcgatcgcgccggaagtaagcgaccacatccgcgaggtggcgctgaaggcgttccgcgcgttggagtgcttcgggttggcgcgggtggatgtgttcctgacgccggacaaccaggtggtaatcaacgaaatcaacacgctgccgggcttcaccaacatcagcatgtatcccaagctgtgggctgccagcggtgtcagctatcaggcgctgatcacgcgcctgatcgaattggcgctggagcgccaccagcaggatcgcgcgctgaacagctcggtgttcgatcgctaaacgcggcagggggcggcggtgccgcccccgtccatcacttcaccgtcacgtcgatgtcgccgaaatacttcttcgacagcgccgccaccgtgccttgctgtttcactttggcgatggcggcatccagttttttcttcagcgcctcatcccctttgcgcaggccgaaggcgataccttcaccgaggattttgtcgtcgcgcaccgcctcgccgacgaaggcgaagcccttgccgtccggctgcgacaggaagccgctttgccccgacggcgccatcaccagcgtggcgtcgagccgaccggccgccagatcgagataaacctgattctgatcctggtaagacaccacatccacgcccgccggcgcccagtgggttttggcgtagatctcctgaattgagccttgcagcacgcccacgtgtttgcccgccagcgctttggcgtccggcagcaggccgctgtcggccttggcgatcaggcggttcggcacctgatagatggcgtcggtaaaggcgatcgcctggcgccgctgttcggtcacgttcatcgccgagttgatggcgtcgaacttgcgcgcctgcagcgccgggatcaggctgtcgaacgaggtttccacccagctgcattgcaactgcgcggcggcgcacaccgcgtcgcccagttcaatgtcgaacccttccagtttgccgctggcggatttggattcgaacggcggatacagcgcttccagaccgaagcgcaggctgttttccgccgccagagaagagccggcggccagcaggcatccggcggcgaacagcgttttcaaagctttcataggcagtgcccctttcccatggtcggacaaaaaattacacctggttcaggcggcgcgcgccttccagcagggtctcgttatctttggaaaaactcagccgaataaggccggtatcggtgccgtcgctgtagaacgccgacagcgggatcgtcgccaccttcgcttcgcggatcaagcgcacggcgaaatcattgtcgctttcgtgactgaagccgctaaagcgggccagcatgaagaagctgccgcggctgggcagcagctcaaagcgcgaatcctgcagggcgctggccagcagatcgcgcttttgttggtaaaacgccgccagccccaggtaactctgcgggttggcgagcgcggcggcgaaggcgtgctgcatcggcgtatcggcggagaacaccatgaactggtgcaccttgcggatctcgtccatcaacgccgccggcgccaggcaatagccgacgcgccagccggtgacgtggtaggttttgccgaacgacgacacgatcacgctgcgttccgccaactgcgaatagcgcgccatgctgtgatgaatttcaccgtcgaacaccacgtgctcgtagacctcgtcggacaggatcacgatgtcggtgtcgcgggtcagggcggtcaggcgttcgatatcctgcgcgtcaaacaccgcgccggtcgggttgtgcggcgtgttgacgatgatcatgcgcgttttgccgttgatggcggcggccacttcgtcccagtcgacgcgaaaatcctgcagcgacagtttgatcgccaccggcgtggcgccctgcaggcgcacgatcggcgcatagctgtcgaacgccggttcgaaatagatcacctcgtcgccgggatgcaccagcgcgctgatcgccgagtacagcccttcgctggcgctggcgatcaccgtgatttcttcgtcggcgtcatagcgcgcgccatacaatcgttcagctttttccgccagggcagcacgtaacgccgccacgccgctcatcggcgcgtattggttatgacctgcgcgcatggcttgcgccgttgcctcgatcagctgcgggtcaccggcgaagttgggcgcgccctgcgacaggttgagggcctgatgttcggcgctgagttggccaatgacggtgaagatagtggtgccgacgtccggcagcttcgagcgggatgagcaggcgctctgcatgatgggctccaggcaaacagggaagtgttgagcgattaagcatcagccggcgtaggcggacaagggaaagtttgtcatacttgccatgcactgtgatcatagctaatcgaggctcgctatgccgatatccttgccgtcgctcgacgtgttgaaaaccttcgtggtggtggcgcaacgccttaactttacccatgccgcccggcagctgcacctgacgcagggggcggtcagtcggcaaatcctcgggctggaacagcgtctgggctatccgctgttcagccgccaggcgcgcggtctggcgctgacgccgcagggcgcgcagctgctggcgccggtacagcaggcgctggggcagttggatgaagccctgacgcgggccgccgctccgccgggggcgctgcgcatcaaatgcccgacctgcgccatgcgctgggtgctgccgcgcatcattcgcctgcaaaatgaacggccggacatgcatatcgagctgaccgcctcggtgtcgcacggcctggatttcagtaccgagcagtttgacgccgcggtggtattcggccggccgccgggtaaaaagctgaccgcgcacttgctgttcgatgaaattctcacgccggtctgcacgccgacgtttctgccgccggcggcccggttgacggacttgacggacaaaactctgctgcacccgacgcgcgatcggcgcgactggctgcgctggctgaaggcggcgggcgccgatgcgttgccgtccggcaaggcccagcatttcgataccctcgatctggcgatgagcgccgcgctgcagggattcggcatcgccatcggcgatctgtgcctgctggaggaggatattcaggcgcagcgcatcgtcacgccgttcccgctctgcgtcagcagcggcgcggcctattatttggtctatcctgaacgcacggtggcgccgccgacgttaaccgcgctggtcgattttctggcggcggaggccgccgacagccgcgcccggctgcagaattacctgccgataacctgtaatgctttgtaaacattagcgatgcgaattcccttggcgatgaaacagagtatggcaaactgtttcttcactccgattaaactccgcggcgttggcggcggaaacacgcctgagataaaacaagatgaaatggctttgtgtggtgagtatgttgtccggtctggccctcagcccggcttttgcgcaggaaacgccgataacgcagggcattcacgcccagcagcgcgatgccttcgtgtcccatttgatgaagcagatgacgctggaagagaagatcggccagctgcggctgatcagcgtcgggccggataacccgaaagaagcgatccgcgaggggatccgcaaagggcagatcggcgccatcttcaataccgtcactcggccggatatccgggtgatgcaggatcaggcgatgcagctcagccgcctgaaaatcccgttgttctttgcctatgacgtggtgcacggccagcgcaccgtgttcccgatcagcctggggctggcggccagcttcgatctggaagccatcgcgctcagcgcccgcgtggcggcgcaggaggccagcgacgacggcctgaacatgaccttcgcgccgatggtcgatatcacccgcgatccgcgctggggccgggtctccgaaggcttcggcgaagacacctggctggtctcgaaaatcgccaaggtgatggttgacggtttccagaacggcgatccggccaaacccggttcggtgatggccagcgtcaagcactttgcattgtacggcgccgtcgaaggcggccgcgattacaacaccgtcgacatgagtccgctgcgcatgcatcaggactatctgccgccttataaagcggcggtggacgccggcagcggcggggtgatggtgtcgctcaacgcgatcaacggcgtgccggccaccgccaacccgtggctgctgaaagatctgctgcgcgagcagtggggctttaaaggcatcaccatcagcgaccacggcgcgatcaaagagctgattaaacacggcgtggccgccgacgcgcgcgacgcggtgcgcctggcgatcacctccggcgtcgacatgagcatgagcgacgagttttacgacaaatacctgccgggtctggtgaaagacgggctggtgtctgaaagcgatatcgaccgcgcctgccgcgacgtgctgaacaccaagtacgacatggggctgttcaccaatccttacgtgcatctggggccggcgggttccgatccgcaggacaccaacgccgaaagccgtctgcaccgcgccgaagcgcgggtggtggcgcgcaagacgatggtgctgctgaagaacgataaacagacgctgccgctgagcaagcaggcgaccattgcgctggtcgggccgatggccgacagccagcgcgacgtgatgggcagttggtcagccgccggggtggtcaagcagtcggtcaccctgcgcgaagggctggagcgggcggtgggcgacaaggcgcgcattctgtacgccaagggcgccaacgtcacgcaggataaaggcatcatcgactatctcaacgagtatgagccggcggtggcgttcgacacccgctcgccgcagcagatgatcgacgaagcggtgcaggcggcgaacaaggccgacgtggtggtggcggtggtgggggaatcgcagggcatggcgcatgaggcctccagccgcgccgacatcacgatcccgcagagccagcgtgatttgatcgccgcgctgaaagccaccggcaagccgctggtgctggtgctgatgaacggccggccgctggcgctgagctgggagagcgagcaggcggacgcgatgctggaaacctggtacagcggcaccgagggcggcaacgcggtggcggacgtgctgttcggcgactataacccgtcgggcaaactgccgatgaccttcccgcgctcggtcggccagatcccgatgtactacaaccacctgaacaccggccgtccgttcggcaaggagaatccgggcaagtacacctcacgctacttcgattcgccgaacggcccgctgtatccgttcggttacggcctgagctacaccaccttcagcctgtcggatctgaaattgtccagcccgacgatggcgcgcaacggcaagctaaccgccagcgttacgctgaagaataccggcaagtacgacggcgccacggtggtgcagctgtatctgcaggacgtcaccgcctcggtcagccggccggtgaaagagctgcgcaacttcaagaaagtgacgctgaaggccggccagtcgcagcaggttgagctgccgattagcgaagaggatctgaagttctacaacgccagcctgaaatggggggcggagccgggcaaattcaacgtgttcgtcggcctggattccgacaacgtgcaggcgcaaagttttaccctgaagtaaccttttccccctctttcactgcggtgggagaggggcactatccctttccgctcatgtcaccggagcttgcctcatgaaacggtatctggactgcagcgccagcgatctggccgatatcggcaaagccgatctgctctatgccatccgcgccagtgaagggcgcattctggtcagcgaaaccattgcggtcactcagccgctgctcaataatgtcaccaacgccgagctggcggccagccagggcgccgatctgctgctgttgaacctgttcgacgtcgatcgtccgcacatcgcgggcctgcccgccgacgtgccgccgcaggaggcgctacgcacgctgcagcggctgaccgggcgagtgatcggggtgaatttggaggccgtcgatccggccttcgccatcgaacataacgacttctggcagatgacggcgggccgcgccgccaccgccgagaatgcgcgcaagctgtatcagctcggcgcgcgcatgctggtgctgaccggcaacccgaacaacggcgtcagcaatcaggcgatcgccgccgcgctgaaagcaatccgcgaggaagtgggcgacgagatggtgctggtgaccggcaaaatgcacggcgccggcatcgtgcgcgaaagcggcagccaactgatcggcgagcaggacatcgcgctgttcgtggagaacggcgcggacatcgtgctgttgccggcgccgggcaccattcccggcatgtcgcaggagaaagtggcggcgctgatcgcctttgcccagcggcagggggcgctggcgatgacggcgatcggcacctcgcaagagggggccgacgtgcagaccgtgcggcagattgcgctgatgagcaaaatggccggggcggacctgcaccatatcggcgataccggctatctggggctggcgctgccggaaaacatcttcgcctacagcgtggcgatccgcggcgtgcgccacacctacagccgcatggcgcgctcggtgaaccgctaagcctggggtttttgcgccgtgacgatgctgaaatagccgagcgacggcagcacctgagcgggcccgaagccgacgtcgcgcagcaggtcgccgatttccttgccggagtattggcggccctgcgtccatcccatcatcatcaggctgtaccccgcggcggcaggcggcccgtcgccgtcatcgttgtacagcacttcgtggatcacgatcctgcccccgggcgggagggccgcatagctcttttgcgccaggaagcggttcttgttcatcggccagtcgtggaaaatattggagtacaggtgcagatccgccgccgggtagggatcgcgccacatatcgccgctgtgggtgccgatgcgctgactgaggccgtgatcgtgcgcgtagtcggcggcgagcgggcacacctccggcagatcgaacacggtgcacgtgagcgccggccagtgggtcgccagactgatggcatgggcgccggaggcgccgccgatatccagtgccgtgcggcaggcaccgaggggcaacagcgtaggccaaacgctggccgagcccatgctcaggctgtgcatggcgtgggtaaacagccgcattctgtcggcgtcgagcgtatgggtttcaaacagctcctgctcgccgtacacctgcgaggcattctttctgatggcgctttccaggtttttcagcgtgaaaatctcgctgttttcaatcatcaaatcccaaaaatagccgaaataatgcgggttgttttttatcaaaaaggtttccgcttccggcgtcagagagaatgtttcgccgtctctgtctatcaatttcaatgccactagcgccatgaccagcgtctctgccgggcgtctttccacattggcctgagcgcatatatcggtcaggttgcgggggcgcaatgcaataaattcaaagatgcccaggcggtgcgcaataagcgccgccggatagagatataaattcatcgtgatatcgagaatggttttgtcgtcgcatggcggcggccggacggaatggttcatgtgaatcccctcccactaaggcatggcgcgtcttaacaggctatgttacgcctgtggttttagcaaagggcgggggcgcgattgaccgcaggccaacgcttacgttgtaaataattccctggtgatactattttaaaattgaatggggtacggttaatgtcgaacgtaaaaactgacgtcgggcggagtaataaccccatcatgcatttttattttactggaggttaacttaatcacagttattaacgcgttagggttgtgttaatctgagccgccgttataccgtaccgacgttcacattattttttgtgaataattcaaagctaaataattcattattaaaacgagataacaatgaaaaagagcattctgaccggcatgattgccgcgactctgggcctgttcaataccgctaatgccgaagggatggaccctgctgcattgaaaaacgtctatgacattacgcgtaataccagcgggctgatgtcttactgcgtcgataaaggttttctgaaagcggacagtatcgacaacgccaagaaaatggtggcctacgtggccgccattcccggcggtgtcgacacccgcgacggtgacaagcgtgaagcgatgggccgtgaaggcaatgtgctgaacgacgacggcaaagtggttgcgttggaaaaggaagcgccacagggtctgcagacatggtgccagcaggctgacgaagggatccgccagggtctgacgtctatcggccaataaacgccggatgtagcctccccctccctaaggcttcgtctgaagggaatctccgggcctgacggcccggagaatctcaccaaaacagcggggtggtgttttcagccaaaaacgccagcagcgtttcgttgaccgccgtcgggttttctttgttgctgatatggccggcgttggggatcagcacatgccgacagccgagaagatccgccatgcgctggccttccgtcggcgggcgcggtttatcctgcgcgccggtgatgacgatgctggcggcggtgatgttttccagcagcgccagcttgtcggggcggccgaagatcatccggcccagcggcacgatgctgtcgcgcagccgatcggcgggcaggctttgcagatgggccagcaaaggctgcgacagcgcagcgggcacttcgtcggaatagaactgcgccgcgatatattccagcagcggtgacgtgatggcgccggcctgttccacggcggccagcatgcccatatagcgctgccgcgcctccggtgtttcgtcgcccaggtagctgtccagcagcgccagcactttcacccgttccggcgccagcgccgccagttccgcgccccacatgccgccgacggacaggccgacgatgccgaactctgcaatatccaaatgatccatcagcgccagatgatcggcggcgatatccgacaggctgtttcgcccaggcggcagcgccggggagtcgccgtggccccagagatcgggcacgatcaggcggtagcgtttcgccaacgcctcgaactgcggtgcccacatgttcagatcgaacagatagctgtggcccagcaacaacggaaagcctgagcccacgtcgagataatgcagggatttgcccatcgttggcatcttgtcggttccttatataaagagagttcggctgcttatatcacactcatattcaacccacggtattaatttactttaaattactcaggtggacgcgggttttttaatttgcattgctaacaagacgtcaataaaaggtgacgctaaggctaatattttggtggtgagcggagccttggtttatgctgtcgctcctttcggtatggaatagataaacagggcgtcgcgatgaaaagacttttcagactattaattattttgcttgtcattttgctgctgacggcggtgctgtggtggttcttcgggcgcggcaatccgaatgcgctgtggcaaatcgtcagccaacagtgcgtgcccaatcagcagcagaacaacgatccggcgccctgtttaaaggttgatttaaccgagggttatgtgctgtttaaggacagcaaaggcccctatcacgatctggtgatgccgaccgaaaaggtcagcggtatcgagagcccggcattgcagacagagcacgcgccgccttatttcgcccaggcctggaataaccgtgaacatatatccggcgagctgggtaaaccgttaaaagatgcgtggatttctctggcggtcaattcgaaatatggtcgctctcagaatcagctgcatattcacgttgcctgcttgcgccaggatgtctataacgcgctggggcagcaggcggaacaattagatcaacagtggcggccgctggcggtgaaattgctcggtcaccaatatctggccagaaaattggcgggcaccgatttaacccaggaagatcctttccgtttactgcagaactatgtggtcgagcagggcgacagcattggcaattacggcctggcgctggcggtcagcccgcagggcgagatgctgctgttggcgaaccgtttgaagctgaccgatctgaacctgggctcggccggcgaaattcaggactaccggtgcgaggtcgcggggaactcaagatgataacggcccgccggcgtggtcagccggcggctgccgtgcggtcagagttttttcagcaatgccatcagctgcgtttcgcttttctccgccagcccgtcgatggcgagcttgatgatgtcggagcgggtgatgcgcacgatgccgttgcgcgccgcctgcacgatcacctcatcgatggcttcgatgtggttgtccgtcaggctgacggaaatcgccttataggtgcgcttgcggccggccggcttggcttccggcgcgggcgccgcaaccggcaacgtgtgtgaggtggcgctgttgatgaattcgtcttccgacatgcggtgggtgggggtgcgcttcttcacaggatcacctctttcaccaggcattcgatctcggcctgcgccttttcgttgttcgcctcatgcacggtgatggcttcgccccaggcgtcgcggtaaattttgcgatcgcacaggcggtggctcaccagggtgaactccgggtattcgctcagcacctgcgccgcttcgttggcttcattaatgaagatattggtcgggcacatgttcagcacaatgtaacctttgaccttctcgttgtattcctgcgcggtggagaacatctccgacaggtagccgatggtgtcgagatccatctgcgaagggcgcagcggcgagaggaacagatcggcggccaacaggccggagcgcagttcggcgctgtcgcggccggcggtgtcgacgatcacgtagtcgtaatggcgatcgagctccagcagcgtttccttgattttgcccgacgcggccaccaccggaatgtgcggcaacccctcgacgttctgacggtcgttgtaccaggtcatgatcgatttctggtcgtcggcatcgacgatgatcgccgtcttgccttgcttaagaatcagatacccggcgatattcaccgctttcgtcgacttgccgacaccgcctttttgcgagccaatcagaacaatcatgctgccatctctcaagttattaagcaggtaacttattaagttaatgtgcttattaggttgataatcaaacaggttaacaagaacaactcgcgaacaatatgcaccaactgcggcggcttgccaagccagtatgtcgttaactgtgcagcttattttgcgctggatggcccggatgggtaagtaggaattctctgggaagtggcgatgcggagggggattttattaatttaacagcttaataagttagtgactcattaagctgttgtcgacattatttcttcatcatcgccttcaggttggcgaacgggttgtgggtggcgacgccgatatctttttgcgcatcttcaccggccaccaccgtcgaaccgtattgatcggcctcggtgtatttcgagtgttcgtggtcgtggcaatacaggcacagcatttcccagttgctgccgtcttccgggttgttgctgtgatcgtgatcgatatggtgcaccgtcagctcgcgcaggttggaataaacgaattcgcgtgagcagcgcccacacacccaggggaacagtttcagcgctttttcgcggtagccggtttccagcttcgcatagtttttggggatataggccatggtggtcgtccgtcgggaatcaatatgcggccaataataccacagtgcgtgcggctacaacgtgcggctcatcaccgtgacggtttcaccggcgacctggcgttgctccagagggcgccagccgagtttctgatacagcgtctgctggtcgggcgtatacagatacagttcgctgatgccctgggttcggccgtgctcgatgcagcgcgcgatcaggttgcgggcgatgccttggccgcggtgctgcgggtgggtaaagacttcgctcagccagtattggcgctccggtttatctgtcaattcataccgcgtcaaactggcggtgccgacgatctgttgctgcggcgacagcgccagcaacacgacgccttggctctcgggcgcacagcgttcagccagccgccggctgatggcgtcgcggttgctccactgcgcaaaggcgccccattcctgatgcagtaattcggccagttcgtcaatgcgctgacgatgtgcaagcagcggttcgatatgcatggtttgcccgtttttattgtccgtaagagaagccactatagccggggcgatcggttaatgaaacgtctccaccgcccagtcgatgaacgcccgcagcttgccgctgaggtggcgattggacgggtagaccacgtacatctgctccggcggcggctgccagtcgtgcagcaggctgaccagctcgccgcgctcgaggtgcggctgcgccataaaccgataaatctggatgatgcctaatccggccaggctcgccgccagcagcgcgttgccttcattgatgctgaccgggtagcgctgttggatggcgatctctttgccgcgctcgacatagcgttgcggatggatgcggtcgttgaccggatggcggtagtgcaccatcggaaagccctgttccagatcgcacgggtggcgcggggtgccgtggcgcgccagataggccggggtggcgcagctgacccagtccagatcgaacagacgccgggcgatcaggctggagtcggccaatgggccgctgcggatcacgcagtcggcgctgtcgctgatcagatcgataacgcgatcgccgatgctgagatcgatttggatttgcgggtagcgttccaaaaagccgggcagcgccggcaacagcagttggcgagcggtgccgctgccggtgtcgatgcgcagcacgccctgcggagaactttgcgactcggtcaggcagccctccatctgctccaaatccgccagccatttcaccgtattttggtaatagcattcgccttcgcgggtgaccgacacgctgcgagtggtgcgctgaaacagcttggtctgcaggtgatcctccagattttggatcagcttggtgaccgtcgctttcggcatgcccagcgaatcggcggcgcgggtaaagccgccggtttccaccacgcggttaaatacccggatagcgagcaaatgatggtccatagggttctcaacgccatgccccggcggtgaccggggcatgtttctgcagatagataatgattaacactgtttagcgccaatcgcgccggagcgcaagctgaggccgaacaccagcgtggcggagaggatcagcgcgccgccgaacagcatggcgctgctgacgccctgccagtccaccacctcgccgcccagcaatgcgccggaggccagcgcgatctggacgacgcacaccagcagcgcctggccggcctccggcgcctgcggcaccgcggcgaacatccagttggtggcgcacaccggcacggcgccaaaggccagcccccacaccaacaccatcagcgtggcgccgccgaggccgctgagcagcggtgagacgatcaggatgcctgccaacatggcggcgatcaggataaaggtggcgcgcaggctgtattcccccaggcgttcgccgaggaacgtgcccagcaggccgacggcaccataggccaacagctgcagcgagatggccgacgggctgagcacgaacacctgctgcagcagggggcgcaggtaggtataggcggcgaagtggccgatgaacagcagcacgatggcgataaggccgatgcgcgccatcggcaggcgcagcggcagcaccagatcgcgcggcgtgaccggccgggacggcggcaccgacgtcagtaagcgcagctgcgccaacagtacgccgaccgccagcgccgcgccgccgaagaaggcggcgcgccagccgaacagatcgccgaccagtgcgccaatcggcacgccgcacaccgcgccgaccgaaacgccgctgaggatcagcgcggtggctcgcccctggctggcttccggcaccagatggcggccatagttggcggcgaacgaccagaagccgccgacgcagacgcccagcagcacgcggccgagcaacatcatcggaaagttgacggccagcgccgccaccagattggataccaccagcagcaacgatagccccagcatcaataaacgccgatccaggcggccggacatcaggctcaatgcgggggcggccaccgccgccacgatgccgggcatggtgaccatcagcccggcgctgccggtactgacgccgagcgagggggcgatgttggtcagcagaccgatcggcagaaactcggtggtgaccatgacaaaacaggcaaccgtcagcgagaagatcgccaaccacggggatgatgcagggttatctttatgattcagcataatgccgctcttctcaggtgaatgcgcaggccgcgcgcggggcgcagcgtgaccgaaatcacaatttacggcaggcgagagcggcggataaatccatctgcggtggttacactgtttctgagggggaacaatcgcggcagtgagttaaagcgcggcttgcgccgcgccgaggggaaaggaataaaacggcataaggttatgaccgaatgccgcgaggcgcttacagccccggcgctttccacagcgaggtggtcaggccgttgtccaccagcgtcaactgatcggcgtagatccgccgccaggtttctttctgttcctgatacagcgcgtggtgggtcatgtccggctgatgctcgcgctcccagcgcaccaggcgctcgccggtttcggccagcgatgcgtacagcccggcgccgacgccggcggcgatcgcgcagcccagcgcggtggcctctttcaccaccggcacccgcaccgtcagccctgtgacgtcgctgaggatctggctccacagcttgcccttggccccgccgccggcgaacaccagcgaacgggcctgcacgccggagaaggcggcgatctgttccagattgcaggcggagacgatggcggcattctcctccagcgcgcgaaacagcgtctgtttgttgcagcgctccgggtcgatcgacatgttgatgaacgacggcgctgcgtgataccaggttttgaaatgcatggcgtcggagaaaatcggcatcacgccgtaggcgcccggcggcactctggccgccatctcttccagcaggctgtaggcgtcgacccccagccgctccgccagcagtttttcttccgcgcagaaggcgtcgcggaaccagcgcatggtcaggccggtaaagaagctgatggattctgcctgcgccatgccgggaatgacgtgggggttgatgcggatgttcatctccggatcgatggccggctccggcaggttgacgatttgctgccagaaggtgccgccgagcaccgccgtctgcccggcgcgcacgatgccgagccccaggctgccgagctgcacgtcgccgccgcccatcaccaccggggtgccgcgcagcagcccgctctcctgcgccgcctgttcggtgacgcgccccagcacgctgccggtctctttcaccggcgacagaatatcggcgcgcaggccggccatgtcgagcaacgccggccgccagtcgcggctggtcagatccagcatgccggtagtgccggcgttggaaggatcgaccgccagttcgccgctcagcatgttggccagccagtcgctgatcatggtcagcgtcgccgcctggcggtagatgtccggccgatggtgcgccagccacagcaggcgcggcatggcgctcagcgccagcgtctggccggagtgctggtacacctcgcgttcgaagccgtggttgtgcagctctttcagctcgctgacttcgtggctggcgcgtgcgtcgacgttggcgcaggcccagatcggcacgccgttgcggtcgtacagcacgatgccttcacgcatcgagcagcaggccaccgcgcggatcgcctgagcgctcaatcctgcacgttgcatcgcctggcggatgcactggcaggccagctgccagttgcggctgaggtcaaactccatcgagccgggcacgcccggcaccgcgaggtgttgccactccgcctggccgtgcgcgatctggttacccgccagatcgaagatcaccgcgcgaatgctgcccgttcctgcgtccagcgccatcaagtagttatccatagcctatgctctcagggggaggaatgttaactatagatgccgccgccttaccccgccgggggaggagtgggcgtcgccgacgcgatttgtgagccaggcggcaaaattgccgttgcagcagggcaatcgacgggaataaacctatggttggaaagcgccatgttacggcgcgccgtttaaacaaggagttgccatgcacgtcacattggttgagatcaacgttaaacaagacaaaatcgacgaatttatcgatgttttccgcgccaatcacctgggcgcgatcgaagagccgggcaacctgcgcttcgatgtgctgcaggatgaacagatcccgacgcggttttacatctacgaagcctatcgcgacgagcaggcggtggcggcgcacaagcagaccccgcactacctgcagtgcgtggagaagctggaagcgctgatgaccggcccgcgcaagaagaccacctttatcggcctgatgcctgaataatcgccggcgtttgccggtgtccatgcgcccggtttggttgtaacctgcaaggcaaagcgaattttcaatgggataagcggggcgaggatgacattgcgcgatcggctgttggcgctgttggtggtggtgatctggggcgtgaatttcgtcgtgatcaagttcggtttacagggtatgccgccgtttctgctggccgggatgcgttttttactggtggcgttgccggcgatcttctttatcccgcgcccgactattccgtggaaatggctgctgctgtacggcatgaccatgagcttcgcgcagttcgcgtttctgttcgtcgccatcaaggtgggcatgccggcggggctggcctcgctggtgttgcaggcgcaggtgttcttcaccctgctgttgggcgttgtgctgatgggcgaaaagctgcggatcaaccatttcgtcggcatcgctatcgccagcggcggcatgctggtgctggcgcaggccagcctgcataagccgggcagcggcgcggtccctctggcgggcctgctgttgacgctggcggcggcgttttcctgggcgctgggcaacctgaccaacaagaagatcctggccggtttcccgcagcgtaatatcttatcgctggtggtgtggagcgcgccgatcccggtcgtgccgttcctggcctgcagctggctgttcgacggccctgaggtggtgctgagcagcctgagccatgtgcaggttggcacctggctggcggtggcctatctggcgttcgccgccacgctgttcggttattcggtgtggggcagcctgctggggcgctatgaaacctggcgcgttgcgccgctgacgctgctggtgccgctggtcgggctgttcgccgcctggctgttgctggacgaagcgttgtcgccggcgcagttcggcggcgcattgctggtgctggcaggcatggcggtcaataccttcgggctgccgcgccgccgggccgtcgccgtgcgctaaaccgaatagggtaattctgttcaatacgctgtcggcggcggtcggcattctggcgcctgtgaatattttctcaggtgtccatcatgaatatctacctttccatggccgcgtttgcgctggcggcctccatcactcccggcccggtcaacatcgtcgcattgagcgccggggcgcaattcggctttggcgcaacccagcgccatgtgttcggcgccacgctggggtttaccctgttgctggtgctgctgggattgggcatgcaccaactgctgatcctgtggccggggctgacccgcttgatccagtgggccggcgtggcctttctgctgtttatggcctatcggctggcgtttgacgacggcagactgggcaacggcgcggcgcaggcgccttcctgttggtacggcgcgctgatgcaatggctgaatcccaaggcatggctggcgtcggtggccagcctcggcgcctttgtcggcgacggtgacattcggctgctgtggcagttcgccgggctctacttcgtgatttgctatgcctcggtagcctgctgggcctatgtcggcgcgatgctgcgcggcctgctcaggcaggcgcgcaacgtacagcgctttaatcgcgcgatggcggcgttgctggcggccagcgcttgctatctgttggcggagggtttttgatactggccgggcgtggcggccaacagctgtttgaaggtgcgctgaaagtgcgcctgatcggcaaagccgctttcgctggcggccgcggcgatcggcaggccgcttttcaatagccgatggccgtgctgtacgcggcggttgaccagataggcgtgcggcgtcatgccgtaacgctggcggaaggcgcggatcaggtaagaaggggacagcgcggcggcgcggcaaatgtcgtccagcgtcagcggccgggtgcagtgcgcgtcgataaacgccgccgccgcttccagccgggtatgcggcggcgtctccggctggcggacatcgcccagcccgagctgcagggcgctgaaatactccaccatggcgatctgtttttccagcgcgctgcacagcggatccgtcagcagcgcataaagccggttcagcccgtggaacagcgccggatcgcggctgagcggctggctgaacggaacaaaacggtcgccctcgccgccgagcagctcctgctgcagcgcgccgagccaggcgagatcgagatagaacatgacgtacgaccaacggcgatcggcgatggggttgcaggcgtgcgcctgctgcgggttgatgacaaccagatcgccggcgctgacctgcatgcgtcgttcgccgttgacataggtgctgacgccgccggtgatggcgccgatggaaaagaattcgtggctgtgcaggctgtagcacacctggcggccatccgcgatggcgcgggcttcgacgaacggcaactgcggatcgcgccagaactgcggcgttttttcactcatacgctttccttttcactgcggcggcatcacagtgttatagcctgaaagcgacgagtgggggaatggcggatgatgatttttaacgtgttcggccgtctgctgggcgtgaagcgcatcggggacgaatggcggctgttccgcgtgacgctgccggagcgcaaatatgctcccagctacgatatcgtgctgccggcggatctgcgcgaagaggagatcgccggctatctgggggatatttatcacgaggccgccacgccgcagcggccggaggtgtttcgcgtcgagtagcgcggccgttactcttccgtattgcgcgccatgaggcggcgctgatgttcctcgctggcggcctggatctcttccagcaccgagccgacgtcggcgcgcttctggatttcgttgaaccggccgctgagggcgctgtccggcgtcaggttgccttcctgatacagcgcccaaatctctttggcgtattggctgtcgcgcagttccggcgcgaactggccgtaatattcggccagattgccgatatcgcgctcgaacatgcttttggcgtggttgttggcggcggcgtccaccacctgcggcagatcgatgatcaccggtccgtctttatccatcagcacgttgaattccgacaggtcgccgtgcaccagcccggcgcacagcatgcgcaccgcgtagttcatcatcagggcgtgatcggcgcgcgcctgttccggcgtcaggatgacatcgctcaggcgcggcgccaccaggccttcttcgtcggtgatcagctccatcagcagcacgccgtccaggcagatatccggctgcggcacccgcaccccggccttggccagcagatacagcgcgtccacttcggtgttttgccaggcttcttcctgctgctggcggccgaatttggagcctttgctcatggcgcgtgcgtcgcggctgttgcgcaccttgcgcccttcctgatagtggacggcctgcttgaagttgcgcttctcggcctctttgtacactttggcgcagcggatctcatcgccgcagcgcacgataaacacgtcggcttctttgccgcttttcaaccggcggatgacgtcgtcgattaacccgtcatccaccagcggctggagtcgttttggaattttcatgcagccttgtaccctatttaggctccggtgtgaatggcttgcgcagttgatagcgtaagttagacccgaaaggcaaacattagttttgccgccgcgacatcattacgcggcggcgggcgatcagaggctgtcggccggcacccagacgctgacgctgccggcgttaaccgggaaatgggcgctgccctggtcgtcggcggtgatttcctccgggcggttgccgaggaaatcgcgccaggcggtgtgcgccagatcggcgccgagcgtaaccgtcttgccgctctcgccgccgttggtcagcaccaccacgcagccgggagcctcggcagtgccggcgcggctgaaggccacgcagtggctgtcgtcgaagtagtcggtttgcgggccgttggcgaagcgctggcgcgcggcgatcagcttctccagctccgggatcgccggcatgtcgatctgatattcaccgccgtcgcgccccttgtcgcggtagctggcgccatacaggtcggggtaaaacacgcagggcacgccctgttcgcgcagcaggatcagcgcgtaggccagcggtttgaaccaaggttccaccggtgcttccagcgattgcagcggctgggtatcgtggttggcgaccagcgtcaccgcgtgggccggatcggcggcggtcagggtatcggtgaagatctgcgccatgtcgaagccgtcgccttgcttcgacgcctgatgaaacttcaggtgcagcgccacgtcgaacagcatcaccttgccgtccaccaactcgatgtattgttgcagcgcgctgagatcgtgcgaccagtattcggcaacgataaacaggtcgcgttgcgcgctgccgcgcacgtgatccgcccactctttgaagaaccaggcgggaatgtgtttggcagcgtcgaggcggaagccgtcgcacggcaaggtttccaacagccagcgcgcccagtatttgagctcctccgtcacggcggtattgcggaactccacgtcggcgcccatcagatagtcgtagttgcctttctcgtcgtcgacctgatcgttccagccgtcgtcgccataatcgttggcgattttgaacactcctttgtcgtccggctgctcaacatagtcgacgccgctgaagcatttgtaatcccagataaattcggaatgcacgccctggcggccggggaaggtgaagcgggtgtaggccagcgcgtcgaagccctgatcgtcaatgtcgttgcggttgttggcgtccaccttgaacacgtgcacccgttctttctcgtccgcgccgagcttgtggttgaacaccacatcgtaaagcacgcccacgccgtgttcacgcagcgtattggcggcatgttccagcgccgccttgtcgccgtatttggtcgccacgctgcctttctggtcaaactcgcccagatcgaacagatcgtaagtatcgtagccgacggagtagccgccggaagcgcccttacaggcgggcggcagccacagatcggtgatgcccagttcggccaggtgcggggcgcgctcggcggcctcctgccacagtttgccgccgtcggggtagtaccagtggaagaattgcagcagggtggtttttttcgtcatgagccagcgtcccggttagccagaaggagagaagcagttaaagcatgggctacttttggcaaaagggacaatggcgcagggaagcgcgcgaaggcaggcgtaaatatgtaaccgacgttgacgaggtagcgcttgagttgttgctatcaagtttttacgttttaaattttatcttttaaatttcaaatggatatttattttattttttgttttacccacttttgccgtttttatgctcacttttattggatttttatttcaattttaaatcttagtatgatttttaattttattaatttgttttaaattggatttaaatgctgtcatatgaaatattttgacatattcaggtgccggattggttattcattcgcaattgtttatgcgttatcgttatgttcaaaattagataacactatcaaccaataacccatccaacgtagcctgaaggtgggagaacaggggagcataacgccgtgaacatcagggatttcagagcattggcgcgcaatttggtcagagaattcggcatgttgaacaagcagagcaacggctcgcgcttttcgccgctgcagatccatctgatgatcgaagtcagcgagcagccgctgggcgtcaccgagctggcggcccggctttgcatcgacaaggccagcgccagccgggcgctgcgcagcctggtggccgccggcgtgatagaaacggtggatcatcctgatgacaagcggcacaacctgcatcggctgagtaaacagggcggcaagacgctggccggcatcgagagcgacgccgacggttttatgcaggcggcgctggcgcagttggacgacgatgagctggcgagcaccactgcggcgatgaaaaagatgaccgcggcgctgcgcagcgcgcgcaaacagcgcgacgccaatctgcgggtgcggccgatcgccgagcgcgacgatgcggcgatggcggcgatcattcgcgacgtgtttcgcgagtacggcatggacaaaatggaaggggtcagtctgcacgatccggatctcgatcggctgaccggtctgtatcgcgacaacggcggccactactgggtgctggagcgggacggacaggtggtggggggcgtcggcatggcgccgctggccggcgaagagcccggctattgcgagctgcaaaaactgtttttcaaacccggcgcgcgcgggctgggcatggcgcgccatatggtggtgcaggcgctgaaggcggcgcgggcggcggggtatcgctactgctacctggaaaccaccgaacagttgaaagaggcaatcgggttgtactatgcgctggggttcacgctgttgacggaacggcgcggcaataccggccaccacggctgcaacgtatgcatgctgaaaaatctccagagcgacgatatgtgagcggtttcaaggttagcgcccgcgccttgtgtcaccctgttaaccgtttgataacaatcacaacgttttatcagggaggaaactatgttgggggatccgatggcgctgcccgcgctggtcacgctggtggtcatcgcgctatgggccagcgcccgcttgccggagtatgtggtcgcgctgctgttctttgcggcggtgatggtcttgcagctggcgcccgccgcggtgaccttttccggtttcgcgtcttccgcattctggctggtgctcagcggttttgtgctgggctccgccatccgcagcaccggtttggcggatcgcctggccaaccgactcttgccgcatctggccggttcctggccccggctggtgggcggcgtggtggcgataagctacgcgctggcgtttgtcatgccatccaatatggggcggattacgctgctgatgccgatcgttatggcgttggccaatcgcgccggtctggcggaaggctcgcgcggccgcatcggtttggcgctggcggtggggttcggcaccttccagctctccgccagcatcctgccggccaacgtgcccaatctggtgatgagcggcgcggcggaaagcgcctatggcagccacttcgcttatctttcttacctgctgttgcacgccccggtgctcgggatcgccaaaggcgcgctgctgacgctgtgcatctgcggcctgttccgtgcgcggccgcagccggtggcggccgaggcggcgcaaaccccgctcagcgccgccgaatggcggctgatcgcgctgttgggcgccacggtgctgttgtggatgaccgacagctggcacggcatcgctcccgcctgggtggggttggcggcagcgtgtttctgcctgttgccgcgtatcgggtttctcaacggcgagcagttcgccgccggggttaacgtgcgcacctgtatctacgtggcggggatcctggggctgaccgcattggtcagccactcggggctcggcgatcggttgggcggtgcgctgctggcgatgatgccggatctgcatggcaaaccgttcgctgcgttcggttcgctggtggggatcacctcgttgctgaatttcgtggtgaccgccaacggcgtgccggcgctgtttactccgctggcgcaggcgttgtccgcaggcagcggcttgccgctgctgacggtgctgatgacccaggtaatcggttacgccacgccgctgctgccgtatcaggcttcgccgatcgtggtggcgatggggatgggcaaagtgccggcgcgcgaggggctgaagctgtgcctgctgttggccgcgctcagctttgcgctgctggtgccgttggattatctgtggttcagactgctggggtggatcccgtaaacagccctgcgccgccggcaaaacaatcttcgtccagcgtcagagtggcgattttatgcaccggtccgcgcatgctgacctgaaaatcgccgctgaaggcgatctgcagctcgccgcccggcatccgcacgctaacccgatcgccgactcgtcccaacttgcgcatcacgctggcggcggcgcagctgctgctgccggaggcgagggtaaaaccggcgccgcgctcccagatgccgatgcgcagcgtctggcgatcgaccacttccaccagttgtacattggtgcgtttcgggaacagcggatggcgttcaatctgcggtccgagccgatgcacctgcgccagatccagtttttccaccggcaccacgcagtgcgggttgcccatcgacaccagcgaaacgcttaacgtctcctccctcaggggcagcggatagttcagcgcctccggcagatcgatcaacgccggcagcgccgccgggctgaaattggcgcgccccatttccaccgttatctgatgcgcgtcttgcgccacctggcagcgcacgtcgccgccggcggtgtgcaccaaaaacggttgatggcccacgcggccgctgtcaaacagatagcgcgcgtagatacgcaggccgttgccgctcttctccgcttcggaaccgtccgggttgatgatgcgcaaggtgggattgacggcgtcgccgctgtcgatcagcaggccgtcggaaccgatgccgtaatgcgggtggcacagcaggcggatctgttcatggctcagccgatcggcgaccgaacggtggcataccaggtagtcgttgcccagaccgtgatatttgtggaacagcaggggagtcatggcgttgctcggctcagcggaaaaaggtcgctacagcttacaacagaacgttggcgttaaagcaagcaaaaggcggcctgagccgcccttttgcacgattgccgatccggccattaattgtagatgatcgcggtgccgtgcagtttattgtcaccggtggtggcgatgatctggaaggattttgcgcccgccgcatcggctttggccgccagtttgttttctaggctgctcaggtcggacgcgccgctgacggtgacgacgccggctttttgcaggtcggcgggttgtgcgttaaccagttcggcggcgaagctgccgaaggagacggaagccagtgcgatggcggcgatggtcattttcaggtttttcatggtcttatttcctatctttgttctttacgatgtttgttttgtaaggtcgttaaattaattaacgatcgataatttaatgttagatgccggtttgacggattgcaagtatttttttaatgatcgttaattaattttttttgacgccctggcgtcgggagcacaacttatcgcgatccgttggtttaattcattgttattgatagatttctgcggtcccgtgcagctggttgttaccgccggcgccgatgatacggaaggattttgcaccggcctgatcggctttggcggccaggctgctttccagcgaggtcagatcggatgcgccgctgacggtaatgacgcccactttctgctggtcagccggttggttctggaccaaatcagcggcgaagctgccgaaggaaatgctggccagagtgagggctgctaaggttaattttaagtttttcataatgttaattcctttccgataacggtgaatagaggggtttaatccgcttcgctaaattatcttaacgatcgataactaaatgctaatcggttctcgacgagggcgcaatatttttttataatgatcgttaagttatttgtgctaaccctgctgtggagcgggacaggagagaatgatgagcatcaatgaagaggtctgcggcaaaaagagccgtggcaggccgaaacaatttgatcgcgaccgggcgctggaaagcgcgctcgatctgttctggcggcacggctatgaagccacctcgctggccgatctggtggaagtgaccggcgccaaagcgccaacgctgtatgcggaattcggcaacaaggaagggatgttccgcgcggcggtggaacgctatctgcaaaaatacaccacctgcaccaaccaactgttggaacaggcgttgccggtagccgagatcgtcgaggcctacgtgcgttcttccgtcgaagtgtttaccgatcccgatacgccgtcaggttgttttatggtgtgcgcctccgccgcgctgtcgtccgcgtccgacgacgtcgcccagatgctgcgcaaaaaacatcatgcccaggaagcggcgctgaaagcctgtttcgatcgcaaggtgcagcagggggaactgctggcgaagaccgacaccgcgctgctggcgaaatacgtcatttgcaccattgaaggcatgtcggtgcaggcgcgcgaaggggcaagccgcagcgatctgctgcggttgctggaggcgttgatgctggtgtggccgcggctcagccagattggcaataaggtgtgacaaccggcccggcttttaccgggccgtttaacccattactgattgaccgggatcaccgcgccctggtacttctcgcgaataaagtcctgaatcggttttgagtgcagcactttgaccagcgccacgatctccggcttgttcacgtcggctttgtgcacggtgatgatgttggcgtacgggttgttttcgccgctttcgaccgcgatcggatccttggtcggattcagcccggcgtcgatggcgtagttggcgttgatcaccaccgcgtcgccttcgttgttgttatacatctgtggcagcagcgcgccctcaacgttggcctggaacttcaggtgtttcgggttttccaccacgtcggtgatgcgcgcgtccactttgctcacccccggcttcagcttgatcacgccttcccgttcaaaaatagacaggatgcggccttcttccgccaccgcgtcgcgcatgatgattttgccgttttccggcagatctttcaggctcttgtacttcttcgagtagataccgataggctcaatatggatcgcgccggcgctgacgaagtcgtagctcttgtcgtcggcgtggtctttcagcaccgagttcaggtaaggcacgtgctggaaatagttggcgtcaatgtcatggctggccagcgcagtgttcggcaggatgtagtcctggaagcgcttgatctgcagatcgatgccttcttttgccagtatcggtttagcctgttcgaggatctcggcgtgcggcacgttggaggcgccgaccaccagcttggtcgccgcggcggcgccaaaagaagccagagtggcgacggaggcgaaagccaacatcagtaggtgctttttcatcatcgttttccttggttaattaacgtttatcgagcgttcttgtcagggtgtcgccaatgaactgaatgacgaaaacgatcagcaggatcgtcagcgtcgccaccagcgtcacgtcactgtggttgcgttggaagccttccagataggccaggttgcccaggccgccggcgccgatcaccccggccatcgcggtgtagctcaccagtgcgattagggtgacggtgatgccggaaaccagcgccggcgagctttccggcagcaatacgcggaaaatcagggtgcggtttttggcgcccatcgagcgcgccgcttcgatcactcctttgtcgacctcgcgcagcgcgatctccaccagccgggcatagaacggcgccgcgccgacgatcagcgccggcagggccgcatccgcgccgagaatggtgccgataagcgacttggtgaacgggatcagcagcacgatcagaatgatgaacggaatggagcggaagacgttgaccaacacggagatcagcgagtagaccgcccggttctgcaacagctggcccttcgaggttaaaaacagcagcacgccgagcacgatgcccagcaccagcgtggccaaaccggcgatgccggtcatgtacagcgtttcccaggtggcgtcccacagttggtccagacgcaggtgggggaacagggattcaatcatgttggataacctcgacggcgatgtctctttcgttcagcaacttgagcatgtcggcgacttgttgttcgttgccttcggcgtggatgtacagttcgccgaacgaaccgttgagggtgtggctgatcttgccgtgcagaatgttgatggtcagggcgtagcgccggatcacttcagaaatcaccgcctgatgggtttgcacgccgacgaaggtcaacttgaaaatcgcccccggcaggtgggcggtgagctgcgggttgaagctctcttcggtgtccgcatactgcgacacctgtttgacgaactgccgggtgatcggctgctgcggccgggtgaacacgtcgagcaccgggccttcttcgacgatgcggccgttttccatcaccgccacgcggtggcagattttgcgcaccacgtgcatctcgtgggtgatcagcacgatggtcaatttcagctgacggttgatgtccaacagcaggtcgagaatggcgtcggtggtctgcggatcgagcgccgaggtggcctcgtcgcacagcagcacgctcgggttattggccagcgcgcgggcgatgccgacgcgctgcttttggccgccgctgagctgcgacgggtaggcgttttcgcgcccctgcaggccgaccagcgcgatcagttccgccacgcgcggcgcaatctgcgccttgggcacgccggcgatctgcatggaaaacgcgatgttctggctgacggtgcgcgaccacagcagattgaagtgctgaaacaccatgctgattttcagccgcgcctggcgcagatggctgcctttggcgcgggcgatatcgaagccgccgacgtcgatgcggccgctggtgggcgtttccaggccgttgagcaggcggatgagggtgcttttgccggcgccgctgtagccgatgatgccgtaaatttgcccggcctctaccgccaggctgacgttgtctaccgctacgacgcggccctgtgtgctgtcaaaagttttgcaaacgttcgaaagaacgatcatagcgaagcggatccttatcgatacatcacagcattccgtccagagcgcggtgcgccggacagagatcgttcggcttttcggctgacggaacctctgttgcgggtgaataccgggcaatcctaccgagggttgatagtgacaggaagaatgtaaaatctattacttattctgatttgatatataaggcggcgggggaggcgggggaagaaaaccggccgcagggcggccggcgagattgatgacaaaccttatacccttgctgggttggcagagagcaccgaataaaaaacaaggaaaatcaatttattgattttcggctgatcaccacaaagaggggaaaaaccacgctttttcccctctttgtcaatagactgaccggccgcagggcggccggcggagggctagcgtttgtccagcttcatgtgcagcagcggaaacgggttgccctggccgtcgagcggcgagcggccggtgatgacaaacccgtagtggcggtagaagccgctggcctgcggattttgctcgttcacgtccagctgcagctcatcgtgcagcgtttccgcgtgggtcagcagcgctttgcccacccctttgccgcgctgatccgcgtcgataaacaacatctccaccttgttgccgttcaggccgataaagccgcagggatgccccgggcgttcttcggccacccaaacgttgaccgccggcaggtagtcgttcagcaccagcgggaacagctgcgcgatgttgtcttcggttaaaaaatggtgggtggcgcgcaccgaacgcagccagatatctgccaattgcgcgttgtcttccgccgcgcgtgctctgatggtaatcatcgaactctctgctatctaagttgaaggaaaagaaactagatagaggttttgtggggttagtgccgaattaacgtgggttaacgccctgcaaagcgcctctgcagtggatcgaataggcccgccttctcgcaagcggtataacaactgtaattcagcaagttaatgctttcaaccgccgcagggcgcaatgaggcgctcgccgcgtgttacactggccgctgaatgagcaagagggcggcaggatggaagcggtacgcgcagcgatagagaaacaggtgctcagcctcaccgggctggcgctcggcggcgtcgattttgagaatccgcccggcgatccggggctgttcggcccgcagtctgtcatctggcaggtacatcgcgatttcacgccgatgctgtgcggcggcgtcagcgccttgctgctgcaaatgctgcacccgctggcgctggccggcgtatgggatcactccaattttcgcgacgatatgatcggccgcctgcgccgcaccagccagttcgtgtcggtcaccaccttcggcccgaccgccgaggcggagcggctgatcgccaaagtcaaagccatccatctgcgggtaaccggcgtcggcggcgacggcacgccttatgccgccagcgatccggcgctgctgacctgggtgcacgtggcggagagcagccgctttctggccagccacctgcgctaccgtaacccccatctttcccgcgatttgcaggatcaatactatcgtgaagcggcgcgcgtggccgccgcgctgggggcgacggcaattcctcagtcctgcgcggaggtcgaagaatacctgcaggcgatgcggccgcagctggtgtgtgatgaacgcacgcaagaggtggcgcgcattctgctgaaggcgccggcgccgagcgcattggcgcgccccctcggcggggtggtgatgcaggcgggcatcgatctgttacccgattgggcgcagcggcagttcggttttcatccgggtgcgctgcggcggcggctggtgcgaacgggcgccgccggtttgggcaaggtgctgggcgcgtcgatgcgcaacggttcctatcagcgtgcggtgcggcgcatcactcagccatcatgagccgcagccgctataattagcctttgtttatcttcgtttacggccgtttttgagacttttacgggtgatccggccagtaatgcgttttacacttggggcaaagccacattccatttttggcgcgcagccgattctgccgcgccctgaccctattgaggtgatatgaacgagtcatacgtacttgctgaagtcagcaatgagaaccagacgctggtcgcggtggttcagcaagatcaccgggcagcctatttttatatctatcccgccgaagcctacagcgatcgctatcaggtgcgcgcctgttggctgcgcaatctggccgccgcgccgctgcaggaagatcgcgccgcgctggaacaagggcagccgccgatgctggcggcggagtattgccgcaacctggaaggggaagcgccgctgaacccggaagggctgatggtggtgtggagcgaaagcgacgacggcgcggccctgtggtattacggccaactgttggcggtgatccccggctggagcctgtatatcgatcattcggtgtgctattcggccagctgtatcaaggagagcccactggcctatccgctcggttcggcctcgaccaacacccaatatgcgctggcggaaagcacccgccagttttggcgcagctggcagcgtgaagagggcaatccgtggccgaagatgcagcgcgattttcaggcgcgctatgagccgcatttcggcccttcggtaaaatactacgccatcgatcagggcaagtggccgccgatggccatcacccagcacgaacgcgacggcatctattacttcctcaccatgggggtcagcatccggccgatgccgtgggtggagatcctgttcaacgacgaggcttcgcgctatcgccgcatggagatggcgatcgccatcgacagtcaatacatgaccgaagacaacgcggtgcagatggccagcgcgctggccggtttcgctcatgcgccgtgggcgcggctgacctggatcggcgaaggacatacgctggagtccgacgtggcgccgctgggctatgagggctatattttatcgtcgtccttctacccgcatcacgcgcacctggctctgccgcagcagtatggcgatccggttaacctgttctgggccagcccggtgtttgccgccgagcgccaattggcgcacgccacgccgaatggcgggcacgatctggtgcacaggctgcgcgagcagggcgtcgaccatattttccgcccgcgccagccggtgtgctgacgcgcttatcttttcttcaggagccgccatgaccaccgcgctattgattatcgatgtgcaggaagggttgtttacgccgccgccggcggatgccgcgggcaccgttgcgcgcatcaatcagctgagcgagcgcgcccgccgggccggtgcgccggttgtcgtcattcagcaccatacgccggacgatgagttgccgcacggcagcgccgcctggcaagtgctcgcggcgctgacggtggcgccgggcgaccatcgggtggagaaaaccacgccggactcgttcctgcgcacctcgctcggcgcgttactgatcgccaacggcgtatcgcagctggtggtgtgcggctactccacgccgttttgcatcgataccacggtgcgcagcgcggcggcgcgcggctatccggtgacgctggcggcggatgcgcatacctgccacgacaaatcctatgccgacggcctgctgatccgcacccaccataacgagacgctgtcgaatatcgacagcttcggcgtgccgatccgcgcggtgcccgcggcggacattgtgttctgagaacggaaaacgggggccaatgcccccgttcgttatttcaggcccgcccgccgcgccgccaccttggccagcgccgcccagtccagatccgcatccccctgcgccatcgcgtcgaggaagttgtctttcagcaccccggcgaacggcatcggcgtatggctgtcggcgccggcggccagcgccagcccgacgtccttcagccccagcgccagccggaatccggcgggtgaatacttctcggcggcgatcagcgcgccatagccctgataggccggggcggcgaagacggtgctgctcagcatctgcaggtagtcggcgccggacacgccgtagttgcgtaccagcgcgctgccttcccccatcgcttcaatggcgctggccaaggtaaagttggtggcgattttgaccacgttagcctgcgccggatcggcaccgaagtgccaggttttctggccaagggcatcgaacagcggctgcgcttgcttcagccgctcgctatcgccggccgccagaatattcagcttgccggcggccgccacgtcgacccgccccagcaccggcgcggcgagatagccgatgccgtgttccgcatgcagcgtcgtcaggcgtttggcgagttcgaccgagatggtcgccatattgatatgcagcgcgcccggtttcatctgttgcagcaatccgctgtccaccaccacctgttgcgtggcggcatcgtcggccagcatggtgatcagcacgtcgacatcggccaactgttccggccgttcggcctgccgcgcgccggcgctcaccagcggctgcgccgcctgcggcgagcggttccataccgttaaggcgaagcccgcctgcaacaggttggccgccatggcgctgcccatcccacccagtccggcaaatccgatcttcatcatgcgctcctttttcaggttgaaggttttaccctagcgcgccgggccaggaacgcaaatgccggagtgtaacgtcgtcttacgcaccggcggcgggttattgacgcgctgccgcagcgggtataccttgatgccatgaatatatcgatgcactccacccacaatcagtcatggtggcgcctcttctgaggcggcacgagtattcacatctctttttaatgccgccggtttggcggcattattttttgtggcgttgatccggcggtctacagaccttcaggagcactgtcatgagctacaccattcttaccggcgatcgcgccaccggcccactgcatttaggccacttcgtcggctcgctgcgccagcgcgtggaactgcagcaccagcataaccaaacggtgatggtggcggatctgcagggcctgaccgataacggcaacaacccgcaaaaaatcagcgccaacgtgctcaacgtggtggccgactatctggcggtcggcatcgatccgtacaagaccaccatttgcctgcagtcggcgctgccggcgttggccgagctgacgatgtactacctcaatctggtcagcgtggcgcggctggaacgcaacccgacggtgaaaaacgaaatcgccgagaaggatttcgcccgcagcctgccggccggctttttgatctatcctgtcagccaggcggcggacatcaccgccttcggcgccacccacgtgccggttggcgaggatcagctgccgatgttggagcaaaccaacgagatcgtgcggcgcttcaaccacatcgtcggccaaccggtgctgacggagtgccagccgctgttaagcaacgtcgggcgtctgccggggctggacgggcagggcaaaatgtcgaaatcacgcggcaacgccatcccgcttggcgccggcgccgacgaggtgcacaaggcggtgatgagcatgttcaccgatcccggccatctcaacgtcagcgatcccggccgggtggagggcaacatggtgttcacctatctggacgccttctgcgaagacgccgcgctggtggcggagctgaaggcgcactaccggcgcggcgggttgggggacgtgaaaatcaaacggctgctggaggattgcctgcagagcctgctcgagccgatccgcacccgccgcgccgaattcatcgccgataaaggcgagctgacgcgcatcctgcagcatggcacccgccgcgcgcatcaggtcagccggcagacgctgcagcaggtcaaggcggcgctggggctggacttctttagcctggaatgatgcgcacgccggggcggcacgcgtcacgccccggccataaaaccatcatcccactgtcataaacttattcgttaataggtgcccataatgattagccactgaaaccagagaaatcatatggctcaggcactgttaaaattggcgcagcacgagttcccagggcagcacgccgccgcatcccgcaaagtgttatcggtaaaggggctcggtaaggcctataaagcgcagcagcgcgtgctggatgacatcaatttcgatctgcacgccggcgagttcgtggcggtgatcggccgttccggcgcaggcaagtccacgctgctgcataccctcaacggcaccattccttccagctgcggcgagatgctgcacttcgaagacgatggcgtggcgcaggatatcgcccagcttgccggccgccagatgcgccagtggcgcgcgcgctgcggcatgatcttccaggacttctgcctggtgccgcggctggacgtgatgaccaacgtgctgctggggcgcctgagccacacctccaccctgaaatccttcttcaaactgttcgatgacgccgaccgcgctcgcgccatcgagctgttgcagtggctcaacatgctgccgcacgcgctgcagcgcgccgagcacctctccggcggccagatgcagcgcgtcgccatctgccgcgcgctgatgcaaaatccgcaaatcctgctggccgatgagccggtggcgtcgctcgatccgaaaaacacccgccgcatcatggacgcgctgcagaaaatcagcgaagacggcatcgcggtgatggtgaacctgcactcggtcgaactggtgaaagagtattgctcgcgggtgatcggcatcgcccacgggaagatcgtgtttgacgggcatccttcgcaactgaacgagcggatcctgcaccagctgtatggcgaagaagccaatcagatccattgaagcacttttgacctttaccctttacacacaaggcacacctaatgaaaaaagtattgagtctgaccaccctgatggccggcgcgatgatggtctttaatgctgccgcagcggatgcgccgaaagagctgaacctgggcattctcggcggccagaacgccacccagcagatcggcgataaccagtgcgtgaagcagttcctggataaagagttgaacgtcgataccaagctgcgcaactcgtccgactattccggcgtgatccagggcctgctgggcggcaagattgacctggtgctgagcatgtcgccgtcgtcgttcgcctcggtctacatcaaggatccgaaagcggtggacatcgtcggcatcgcggtcgacgacgtcgaccagtcgcgcggctaccactcggtggtggtggtgaaggccggcagcccataccagaaactggaagacctgaagggcaaggccatcggcttcgccgatccggactccacctccggcttcctgatcccgaaccaggcgtttaaaaagctgttcggcggcacggtcgacaacaaatacaacaacaccttctccagcgtcaccttctccggcggccacgagcaggacatcctcggcgtgctgaacggccagtttgaaggcgcggtgacctgggcgtcgatgatcggcgactacaacaccggctacaccagcggcgcgttcacccgcatgatccgcatggatcacccggacctgatgaaacagatccgcatcatctggcagtcgccgctgatcccgaacggcccgatcctggtgagcaactcgctgccggccgactttaaggccaaagtggtcaccgccatcaagaagctggataaagacgatcacgcgtgctttatcaaagcgatgggcggcaaacagcacatcggcgacaccaccctggcggaataccagaccatcatcgatatgaagcgcgagctgaccaaaggcgaccgttgattcccggctgcctcggccgcccgaatgaaggggttcagcatgctgaaccccttgttccataacgatggaagacctgttttgaataccgatttcgcacactattaccaacggatccgcagcaagcaaaagcgcgaagcgctgctgtggtcgctcgggctggtggtgctgtacctgggcgccggcaacctcgccgagttcaacctgcacaccgtctgggtgtctattccgcacttcttcgactatctggccgaaaccgtgccgacgctgcactggcacctgctgttcgccgacgggcgcaccgaaggctcgctggcctattggggctatcgcctgaacatccagttgccgctgatctgggagaccctgcagctggcgctggcggcgaccattttttcggtgctggtggcgaccgtgctggcgttcctggcggccggcaacacctatactccggcctcggtgcggctggcgatccgcacgctggtggcgtttctgcgcaccatgccggagctggcgtgggcggtgatgttcgtgatggcgttcggcatcggcgccattcccggcttcctggcgctggcgctgcacaccatcggcagcctgaccaagctgttctacgaatcgatcgaaaccgcctccaacaaaccggtgcgcgggctggcggcctgcggcgccacgccgctgcagcgcatgcgctttggcctgtggccgcaggtgaagccggtgtttctctcctacagcttcatgcggctggagatcaactttcgccagtcgaccattttggggctggtgggggcgggcggcatcggccaggagctgatgaccaacattaaactcgaccgctacgatcaggtcagcatgacgctgctgctgatcatcgtggtggtttccgtgctcgactatgtgtcgggcgagctgcgcaagcgcgtggtggagggggcaaaatgacagcgggcaccccggcgtcggcggaaacgctgagccagctaaaacagcagcatccggcgatcttcgcgcagcaggggcgttacctgcgcaccgtcggcctgatcgccttggcgatcgtgctgtactacgtgttcttcttcctggtcttcggcattagttggccgcagtttatcaacggctgccagcagctggggcgctatttcctgcgcatgttcgtctggcatgacttcgccaactggccgttcatgtactacttccagcagattggcatcaccatcgccatcgtgtttgccggcaccatcaccgcgtcgctgatcgcgctgccgctgtcgttcttcgccgcgcgcaacgtgatgtcgacgccgttgctgcggccaatttcggtgctggtgcgccgcttgctggacgtgctgcgcggtatcgatatggcgatctgggggctgatcttcgtgcgcgccgtcggcatggggccgctggccggggtgttggctatcgtgatgcaggatgtcgggctgctgggcaaactgtacgccgaagggcacgaggcggtggacaagtccccgagccgcggcctgacggcggtgggcgccaacgggttgcagaagcaccgctacggcatcttcacccagtcgttccccaccttcctggcgctcagcctgtaccagatcgaatccaacacccgctctgcggcggtgctgggtttcgtcggtgccggcggcatcggcctggtgtacgcggagaacatgcggctgtggaactgggacgtggtgatgttcatcaccctgatcctggtggtggtggtggtggtgatgatcatggacaaggtctcgtcgctgctgcgcaacaagtacatcatcggcgaagacatcccgctgtatcagcaaaaaagccaaatcgattgagaaaccccttgccgatccctatactgccgcacattcaaggtgtgcggccatacccgtcatacttggagctgcctctttgttggctgcatttgcgcgccccggtcacatagttaactatgctccgggggcttacaaatttgccgccgcgatgcaactccaattattttgggtatggggcatttttttacaatgcgcacgtccccgttagacaaataaggcaatgcaatcccatgatgaacaacgacgtgctgcgcagcgtgcgctatatgctgagcattaacaacgccaaaatggtcgagattatcaaactggacgatttcgaggtggcggtgtcggcgatggacgcttacgtgatcaaagaaggcgagccgggctacgagaagtgcccggacgaagtgatggcgcacttcctcaacggcctggtgttcttcaaacgcggcaaggacgacaagttcccggcgccggcggttgagctgccaatcaccaacaacctggtgctgaaaaagctgcgcgtggcgttcgagctgaaagacaccgacatgcaccagattttcaccgcggtggatttccgcatctccaagccggagttgagcgcgctgttccgcaaggagggcaccaagaactaccgcccgtgcggcgatcagatgctgcgctacttcctcaaagggctggcgcagcgcgttcgcggcgagtaacgcgtagcgttcaccgaacatcaggcgcaatcgcaaggttgcgccttttttattgccgctctcccgcccgccgttgttgtacaggccctcagccatccgtcatcgatggagggcgtgccgcctatccggttactttttcatggtcaattcaatcacccaaaccatgaggaaagcaggatgccaaccatcacgaaaacccaatcactttacacgttgacccggcctgtctggctggatgcggcaggcatgagcaaaggcatcgatcacgatcgccagcacctgggcatcattctcgccgccgggcaggtgctgcgagtgcgccagaccaacgcggcgtttaccggcaagctcacgctgcgtttgctgaatgacgacagcaaaacggaggcggaattcagcgttggcgcgagctgggtcgaggcccaggtcaatgccgtctcggtgccgttcatcgatacgccgtatgggcagggcgagccggtgctggagttcgagtacccggacacggcgaaagcgctgccggtttatcgccgtggcgaaaacgaagccgcgttctttgcccgctgggacgatcgggacgccgagtttgccctggtcgatgcggagtacgcagtgttgctggtgccgaaaatcagtaaaccggcgctgaagtcgctgggcgacgcgaaaaacatcgacgggctgatcgcctactacgatcgcattttcactttctacaatgcgctgaccggcgtctcgttcgaggctgaacacgaatccgatcgcaatattcgcaaccgctactttatgaaggccgataagcatggcgccggcgccgcgtattacggcggccgctggacggcggaaaccagcaactcggtcagcagcttctggctgacgccgaaagacagcaactggggcagcctgcatgagatcgcgcacggctatcaggggcactttatgggcgacaaatatttctccaccggtgagatgtggaacaatatttatgccgcttgctatcaggacgtgatgctgggggaacgcaaataccaggaggggtggctgtataactacggcaacgcggccggcgtcgagaagaaaatcatcgatctgatcgctcagggcacgccgctcaaccagtgggatctgcgctccaagctgttcttcgcgatgctgatggtcgacaaggcaggcaagaacgccttcacgcactttaatcagcaatatcgtcaaagctgcaacacgccgggcttcgtgccgtcggaacatgccttgctggatctgctgtcggcaagcttcgccgcggccggtgagcagatcgacgtgacgccgttcgtcgagctgaccggcggcgtgatcacccaagcgcagcgcgatcgcaacgcgttcagccacgccaaggcggtgtatccgctgtatcaactggtggacgcgcagagtctgccggcggtgcaggcgcagctgaaactggattcctcgctgcggctggtcgattcctgccagctcaaggccagcgggctgaaaggcgacgtcaccctgagtctggatatcgatgactttgcgcagatctacggtgaagacctgatcctgatggaaggggcgcgctatgcccacaaagtccgtatcgacacgccgaccttggcgctgaccgcgctgccggtcggcgtgtataccttgcggttgccgaccggtaaagatcgtaaatatcggccgacggcggaatacctgacggtgaaacaggggaaaaacgcggtgacgcttcgctttgagcgcaaagccgcttcgccgatcgtttctcaggagatcaatctgttgggcctgagcgatgcggtctttgccaccgtggtcgtcgatcgcgccaaaggagcggtggtggttgacgtgaccagcaccacgccgcacgcctacttcccgggtgaaacctatgcacgggtgacgctgcgcgatcggcagggcgcggtgcgcttcagcaaggagattcagggcactcaggctaccttaagtcatgacgagctgccgtttgccgagggcgatgacatcgagatttaccatgtggagccgagtcgggtgcgcctgaatccggcggcgaccggggttatcgataataaaaacaaaaccaacgtgctgcgtatcgaaaaaagcgggctgaaaaacccggcgctgtccggcgatcctgaacaagcgctgctggcgcgcctggaacaggcggcgcagcgtttgcgccatctgctgccggcttactatgcgccatcatcgtcgttcaaagatgatatttatctggcgatcggcgcctttgccgagccgcagcgcgagtcactgttggcgacctatcgggattgcctgccggccgacaatacgccgccgggtgccaacgtcggcaatgcgtttaccgtggctgccaaagggatcggcgatcgccagttcctgaccggcgccatcgatctggtgaagaaaaccgttactgtcacgctggcggcggggattgctcaccactactttgccgacagctacgccttcctcagcgtgacggatgcggacggcaatgtcttgctcagttacgacgtcatcggcagccagaatcaaccggccaaaacctgggtgttgccgctgtcgggttacggcggtgaagtgattcaactgcggcatgaagagccggacaaccgcttggcgatcgtcaacgaaatgcagcacctgcggctgacggagaagggcaagcaacagacctactgcattacgccggtcggtttgaaacgcatcaacgactgatccccatcggcctgcggggcggcgagtgtcgccgccccggtttttcctctgcgtcatcccgccattgcactctttttgttcttccgctgcgcaccgctggtgcagcccgtttcccgccgctgtcataagttttaattataatttattgaaatcatgagattaaaaattggcacgacggttgctctgttggatcccatcttgtgtaccagatggaattcagccgatgagcgaacctgttgaagcgtgcggttttaccctcagtgaatggcagcaccattatcaaacccgtccggcgggcgagcgccttgcctgcgtcagtgcgacgatcgaaacgctggtcgccggcctgaacccggacgataacgcctggctgtatctcgccacgtcggcgcagcgcgagcagcagtatcggcagctggcgcagaggctcgaagcggtcgccggcgatctcagccgcctgccgctgttcggcgtgccctttgccatcaaagacaatatcgacgtcggcggctggccgaccagcgccgcctgcccggcgttcacctatcaggccgcggcggacgccaccgtggtcgcccacctgcgcgccgccggggcgatcgccctcggtaaaaccaacctcgaccagttcgctaccgggttggtgggcacccgctcaccttatggcgcggtggtcaacagcttcgccagccgctacgtcagcggcggttccagttccggctccgcttcggtggtggcgcgcggcctggtgccgttcgcgctgggcaccgataccgccggttcggggcgcgtgcccgccgggttcaacaacatcgtcgggctgaagccgaccaaagggcggttgtccaatcgcggcgtggtgccggcctgccggttgaacgacaccgtttcgatcttcgcgctgacggtggccgatgccgcgcaggtggcggagctggcgagcggctttgacgcggcagatccgtattcccgcgccgatccgcataccgcgccggcggatatccccgccgcgccgcgtttcgccgttcccgcccagctggagtttttcggcgacgtgcaggccgagcgggcgtttcaccgagcgctggcgcagctgcaggcgggcggcgccacgctggaacccctcgatttcgcgccgtttcgcactctggcggaacagctgtattacggcccctgggtagcggagcgcacggtagccattgagcaggtgctggaagcgaacccgcaggctatcgatccggtggtgcgcggcatcgttggtaacggcctcggctacagcgcctgcgacgcctacaaggcggaatacctgcgcgccgagctggcgcggcagatcgcccagcggctggcgccgttcgacgcgctggtggtgccgaccgcgcccactatccgcaccctggcggagatggcgcaggaaccggtgctgttcaattcgcagttcggcacttacaccaatttcaccaacctggccgatctgagcgcgctggcgctgccgggaccgctgcgcgaagacggtctgccggcgggcatcaccctgattgcgcccgcctggcatgaccgggcgctggcggcgtttggcctgcgctggcaacggcaaagcgccttgccgctcggcgctatcggccgggcattgccgccgcagccggcgccggccccgtcttcgggacacgtgcgtctggcggtagtaggcgctcaccttagcggcatgccgctcaacgcccagctgacgcagcgcgacgcggtgtgggtagagcaaaccgtcaccgccccctgttatcgcctctacgcgctggccgataccgatccgccgaagccggggctggcgcgcgcggcgcagggggcggcgatccgcgtagagctgtgggacatcccgctggcccgtttcggcgagtttgtggcggaaatcccggcgccattgggcatcggcacgctgctgctggcggacggccggcgggtgaaggggtttatctgcgaagcctgggcgctggaaggcgccacggatatcactgagtttggcggctggcgcgactatctcgccagcgttaagggggcatgaacatgtttactaccgtactgatcgctaaccgcggcgaaattgcctgccgcgccattcgcaccctgaaacgcctgggcgtcaccagcgtggcggtctattccgacgccgaccgcaatgcgccgcacgtcaccgaggccgacagggcggtggcgctcggcggcgacaaggccgccgacagttacctgcgcatcgacaagatcctcgcggccgcggcggccaccggcgcgcaggcgatctaccccggatacggctttttgtccgagagcgccgagtttgccgacgcctgcgaggcggcgggcattgcctttatcggcccgacggcggcgcagatgcgcgagttcggcctcaagcaccgggcgcgcgagctggcggcgttggccggggtgccgatgacgccgggtaccggcttgctggagagcattgagcaggcggtcgccgccgccgcgcgcatcggctacccggtgatgctgaaaagcaccgccggcggtggcggcatcggcctgacgcgctgtgacgacgaggcggcgctgcgcgacgcctacgacagcgtcaaacggctgggggagcagttcttccgcgacgccggcgcctttatcgaacgcttcgtcgatcgggcgcgccacgtcgaggtgcagattttcggcgatggccaggggcaggtggcggcgctcggcgagcgcgactgttcactgcagcgccgcaaccaaaaggtggtggaggaaaccccggcgccgcatctgccggcggcgacccgccaggcgctgcatcgggcggcggtggcgctgggcgagtcggtgaattaccgcagcgccggcacggtggagttcatttacgacgccgcgcgcgacgagttttatttcctggaagtgaacacccgcttacaggtagagcacccggttaccgagatggtcaccggcctggatctgatcgcatgcatgctgcaggtggcggcgggtgacgcgctggattgggcggcgttgcgccgcgcgccgcagggcgcggcgatcgaggtgcgcctctatgccgaagatccgctgaaaaacttccagcccagccccggcgtgctgaccgaggtgcatttccctgacgacgtgcgcctcgacggctgggtggcgaccggcagcgaagtttcggcgttttacgacccgatgatcgccaagctgatcgtgcacggcgccgatcgggcgcaggcgctggaaaaactgcgcgtggcgctggcggcgacccgtttgcacggcatcgccaccaacctcgactatctgcggcaggtgatcgccacgccgcaatttcagcgcggcgacgtctggacgcgcctgctggacgatttgcgtttccagccgcactgcctcgaagtgctgcaacccggcacctacagcagcgtgcaggattatcccggccgcctcggctattgggacatcggcgtgccgccgtccggcccgatggacgacttcgcgtttcggctggccaaccgcatcgtcggcaaccacccggcggcggccgggctggagtttaccctgcaggggccgacgctgcgctttcactgcgacgccaccatcgcgctgacgggcgccagctgcccggccgatctggacggcgaggcggttgcgtattggcggccgattacggtgcgggccgggcaggtgctgacgctggggcgcgctacgcacggctgccgtacctatctggcggtgcgtaacggcttcgacgtgccggtatatctcggcagccgctctaccttcgcgctcgggcagttcggcggccacgccgggcgcaccttgcgcgtggcggacatgctggcgatcgcccaaccggcgctggcggccagcaccacgccggcgccgatcgccgcgccgcaggcgatggacgacagcctgatcccgcactacggcgatcaatggcacatcggcgtgctgtacgggccgcacggcgcgccggactttttcaccgccgaatcgatagaggccttcttcgccaccgactggcaggtgcattacaactccaaccgcctcggcgtgcgcctggcggggccgaagcccgagtgggcgcgggaggacggcggcgaagccggtttgcacccttccaacgtgcacgactgcgagtacgccatcggcgcgatcaacttcaccggcgacttcccggtgatcctgacccgcgatgggccgagcctcggcggcttcgtctgcccggtgaccattgccaaggccgaactgtggaaagtggggcaggtgaagccgggcgaccgcatccgtttccatccgatcggcttccggcaggcgcagtcgctggagcaggcgcagctcggcagcatcgaagcgctggcggcggtgaaggccatcaccctgccgccgccggatctggccccggcggagaccgtttccgccgcggtgctggcagcgctgccggcggcggaggggcgcccggcggtggcgtatcgccaggcgggggacggctacatcctgatggagtacggcgacaacgtgctcgatctggcgctgcgcctgcgcattcatctgctgatgcagtcgctgcgtgaggaggcgataccgggcgtggcggagctgtctccgggcgtgcgttcgctgcagatccgctacgacagccggcagattagccaggccgacctgctgcagcgcctgctggcgcgcgaacgggcgctgggggacgtcagccgcctgaaggtgccgacgcgcaccgtctggctgccgatggcgtttgaggattcggccacgctgggggcggtggatcgctatcagcagacggtgcgcgcctcggcgccctggctgccgaacaacgtcgatttcattcagcgcatcaacggcctgagccgacgcgagcaggtgcgcgacattctgttcgacgccagctacctgatcctcgggctgggggacgtgtacctcggcgcgccctgcgcggtgccgctcgatccgcgccatcgcctgctgagctccaaatacaacccggcgcgcacccataccgccgaagggacggtcggcatcggcggcatgtacatgtgcatctacggcatggactcgccgggcggttaccagctggtggggcgcacgctgccgatctggaacaaattcctcaaaaacccgcagttcaccgccggtgagccctggctgctgcgctttttcgatcaggtgcgcttctacccggtcagcgagcaagagttggacgagcagcgcgaagcgttccgcgaagggcgcatgcaggtgcgcatcgacgagagcgagttcgacttcgccgcctacacccgtttcctggccgacaacgccggggcgatcgccgacttccagcatcgccagcagcaggcgttcagcgccgaagtggcgcgctggcgcagcgatgacgacgaggccgaggcgcagctgttgcagccggaggaagaagacgccatcgacggcgatctggtcagcgccgatctgaacggcagcgtgtggaagatcttggtggaaccggggcaggcggtggcggccgggcagccgctgatcgtggtcgaggcgatgaaaatggagctggcggtcaccgcgccgcgcgccgggatcgttaagcgcatcagctgccggcaggggcggccggtcgggccgggcgacgccctgctgtggctggaaaaggcggtctgaacggagaagcgatgatgcaaatcaccaacggagagcacaaggcgcgcccggaggggctggcggagcgcatttatctgcagctcaaggccgacattttcgagtttcgcctgctgccgggcgatcgcttcagcgaaagcgaggtggcgcagcgcatggcggccagccgcacgccggtgcgccaggcgctgtttcggctggagcgcgaaggctatgtcgaggtgctgtttcgcagcggctggcaggtgcggccgttcgatttcgcctacttcgaagagctgtacgacctgcgcatcgtgctggaacaagaggcggtgaaacggctgtgcgaacgcccggccggggaaacgccaggcgcgctggcggcgctgagccgtttttgggccgaagcgccgcgcctggcggacggcaaggcggtgtcgcagcacgatgagcagtttcatcaggcgttagtggccgcggcgggcaacggcgaaatggcgcgcattcaccgcgaactgaccgaaaaaatccgcatcattcgccggctggatttcacccagcaggcgcgggtggacgccacctaccgcgaacacgccgccattttgcaggcgatcctgcagcggcaaagcggggcggcgcaaacgctgctcggcgagcatatcgccgtcagcaaggcagaggtacgaaaaataacgctgcacatgttgcaccaggcgcgggctcagcagcctgtgcgctcggcgtaacgattttgatttcacacacatcaggagtttgaactatgcaacgtcgtcgttttatcaaagcttttgcgctgtccgccgccgcgatcggcatgggcctggcctggagcgcgcaggccgccgacaccatcaaggtcggtattctgagttcgctctccggcaccatggcgatttccgagacgccgctgaaggatgtggcgctgatgaccatcgacgagatcaacgccaaaggcggggtgctcggcaaaaagctggagccggtggtggtggatccggcctccaactggccgctgttcgccgaaaaggcgcgccagctgctgagccaggacaaggtggcggcggtgttcggctgctggacttcggtgtcgcgcaagtcggtgctgccggtgtttgaggagctgaacggactgttgttctatccggtgcaatacgaaggtgaagagatgtcgccaaatgtgttctacaccggcgcggcgccgaaccagcaggcgatcccggcggtggaatacctgctgagcgaggacggcggcggcgccaagcgcttcttcctgttgggcaccgattacgtctatccgcgcaccaccaacaagatcctacgcgccttcctacacagcaaaggcgtgcaggacaaggatatcgaagaggtctatacgccgttcggctacagcgattaccagaccatcgtcgccaacatcaagaagttcgccgccggcggcaacaccgcggtgatctccaccatcaacggcgattccaacgtgccgttctacaaagaactcgccaaccaaggcgtcaaggccaccgacgtgccggtgatcgccttctcggtcggcgaggaagagctgcgcggcatcgacaccaaaccgctggtgggcaacctggcggcctggaactacttcgaatcgctggataacccgaccaataaacagtttgtcagccagtggaaagcctacgccaaggcgcacaatctgccgaattacgccaccgcggtgaccaacgatccgatggaagccacttacgtaggcctgcacatgtgggcgcaggcggtggaaaaggccggcaccaccgacgtcgataaggtgcgcgcggcgatggccgggcaaaccttcgccgcgccgtcgggcttcacgctgaccatggacaaaaccaaccaccacctgcacaaaccggtgatgatcggcgagatcgagagcaacggccagttcaacgtggtgtggcagaccgaagcgccggtgcgtgcgcagccgtggagcccgtatatcgccggcaacgacaaaaaaccggattacccggtgaaaggcggcaagtaacgtcactcagcgccggcgcggctcgacgcgcgccggcccaacagaagaggcagctgatgcaatctccgtttttatcctctctgcgcgccgggctgtggctattgtgcgcctggcccctgctggcgcaggccgggccggccgatgagttcgcggcggccactcgcgcgcagcaggccaaactgctgcaggcgtgggcggccgagccggatcctgcgcgtctgccgttgctgcaggggctgcagcaggaaaccgtggcgatcgacgaggcgaaacgcgcctttatccgccagggcgaccgctatctgccgcttgaaggtgaggcggccccggttggcgagccgaagaaggtgtggctgaacaaccggctgcgcattctgatcgccaacgcgttgtcggcgcagcggttggtcagtgcggacgcggcggtgcggctgcaggcggcgaccgcgctgcagcgcgaggcgcagggcgagcagttgccgctgttgacccggcggctggcgcaggagcaagacccgcaggtacgcgacgcgctgagcattgcgctggcgaacctgcaattggccgacgccagcccgcaggtgcgcttcaatgcggtgcggctgctgggggaatcgggcgagccggaaacccgcgcgcggctgcaagccttgaccgacgcggccaatgagccggacgccgcggtgcgcgccgaggcgcagcgcagcctgcagcgcgtgcagcatcgcctgatgatcggcgatctgctcggccaggcgttcagcggcctgtcgctcggttcgatcctgctgctggcggcgcttggtctggcgatcacctacggcctgctcggcgtcatcaatatggcgcacggcgaaatgctgatgctcggcgcctattcggcctatctggttcaggggctgtttcaacagtttgcgccgcagtggctggcgctctatccgttggcggcgctgccggtggcgttcgccatcaccgccgggatcggcatggcgctggaacgcacggtgatccgccacctgtacggccgaccgctggaaaccctgctggccacctggggcatcagtctggtgctgatccagctggtgcgggtgctgttcggcgcgcagaacgtcgaggtcgccaacccggcgtggctgtcgggcggcgtgcagctgttgccgaacctggtgttgccgtggaaccgcatcgcggtgatcgcgttcgtgctgctggtgctggcgttgacctggctgttgctgaacaagacccggctcggcatgaacgtgcgcgcggtgacgcaaaaccgcgcgatggccgcctgctgcggcgtgcccaccgggcgggtggacatgctggccttcgggctgggttccggcatcgccgggctcggcggggtggcgctgtcgcagttgggcaacgtcgggccggagctggggcaaggttacatcatcgattcgttcctggtggtggtgctcggcggcgtcggccaactggcggggacggtggcggcggctttcggcctcggcatcgtcaataagatcctcgaaccgcagatcggcgccgtgttgggcaagatcctgatcctggtgctgatcgttctgtttattcaaaagcgtccgcaggggctgttcgccctcaagggcagggtgattgactgatgagccaaccattgaccgtaaccggcgtgcagaaagcgccccggctggcgttgagcatcggcgcgctggcgttgctggcgctgttggtgatgccgttcttgacgctgttgccggcggatcatccgctggcggtgtccacctataccctgacgctggcgggcaagatcctgtgctacgcggtggtggcggtggcgctcgatctggtgtggggctatgccgggctgctgtcgctcggccacgggctattcttcgcgctcggcggctacgccatgggcatgtacctgatgcggcaggcggcgggcgacgggctgccggcatttatggcgttcctctcctggaatgagctgccgtggttctggagcggcacccagcatttcgcctgggcgctgtgcctgatcgtgctggtgccgggcctgctggccttcctgttcggctacttcgcctttcgctcgaaaatcaaaggggtgtatttctcgatcatgacccaggcgctgacctatgccggcatgctgctgttctttcgcaacgagaccggcttcggcggcaataacggctttaccggtttcaccacgctgctcggctttcccatcaccgccgccggcacgcgggtggcgctgttcctggcgacggtgctgctgctggccgccagcctggccatcggctttgccctggcgcgcagcaagttcggccgggtgctgaccgcggtgcgcgatgcggaaaaccgcctgaccttctgcggctacgatccgaagggcttcaagctgttcgtctggacgctgtcggcggtgctgtgcgggctggccggcgcgctctatgtgccgcaggtcggcatcatcaaccccggcgaaatgtcgccgaccaactcgatcgaggccgccatttgggtagccctcggcgggcgcggcacgctggtggggccgctgctcggcgccggcatcgtcaacggcgccaagagctggttcaccatggccattcccgaatactggcagttcttcctcggcctgatgtttatcgtcgtcacgctgtttctcccgaaaggggtgatcggcctgctgcggcggaggaaaagcttatgaaggcgatgcaagtgaccgacgaactgtttacccatccgctgccggcggacaaataccggcagcaaaccgatccggtgctgcagctcgacaacgtcaacgtcagcttcgacggttttcgcgcgctgaccgatctgtcgttgcgcattggcgtcggcgaactgcgctgcgtgatcggccccaacggcgccggcaagaccacgctgatggatgtgatcaccggcaagacccggccggacagcggcagggtgttttacgatcagaccgtcgatctgacccggctggcgccgatgcagatcgcccacgccggcattggccgcaagtttcaaaaaccgacggtattcgaggcgctgacggtgttcgaaaatctggagatcgcccagaaaacccgcaagtcggtgtgggcctgcctgcgcgctcgcctgagcagcgagcagcgcgaccgcatcgacgagatgctgaagaccctgcggctggggcatgagcgccaccggcccgccgggttgctgtcccacgggcagaaacagtttctcgagatcggcatgctgctggtgcaggaaccgcacctgctgctgctcgacgagccggcggccggcatgaccgacgccgaaaccgactacaccgccgaactgttccgcgagctggcgggcaagcattcgctgatggtggtggagcacgacatggggtttgtggaaaccattgccgatcgcgtgacggtgctgcatcagggacaggtgctggcggaaggatcgctggcgcaggtgcaggccgatgaacgggtgattgaggtatatctggggcgctgaggaggcgtaatcatgctgcaggtagaggaattgaatcagttttacggcggcagccacattttgcgcggcctgtcgttcgaggcgcgcatcggcgaggtgacctgcctgctggggcgcaacggcgtgggcaagaccacgctgctgaaatgcctgatggggctgatcccggcgcgcagcggcagcgtccgttggcagggcgaagccatcaccggtaaaaagccgcatcagcgggtgctggcgggcatcgcctatgtgccgcaggggcgggagattttcccgcgcctgacggtggaggaaaatctgctgatggggctggcgcgcttttccggcgccgacgcgcgcgcggtgccggatccgatctatgacctgtttccggtgctgcggcagatgaaggatcggcgcggcggcgatctctccggcgggcagcaacagcagctggcgatcggccgggcgctggcctgccggccgcagctgttgattctcgacgaaccgacggaagggatccagccttcggtgatcaaggagatcggcgcagtggtcaaacagctggcggcgcgcggcgatatggcgatcctgctggtggagcagttctatgacttcgccgccgatctggcggacagctatctggtgatgtcgcgcggcagcatcgtgcagcgcggcgccggcagcaatatggaacaggacggcgtacgcgcgctggtggcgatttgaacgaaaaaatgggagccgcatgtctgaaagtcgtgccgttgtttttccttgctgatgttatggattaatctaaaagacgttctttattaatcccttgccatggatagctaacatcatcatgaacgaaatcactgtgtcacgcctcggttgcatcgtcctgtctctgtttccggccctgtgggggctgttcagcctgttgaacaatacggcggatttcgccggcaccgcgcgcaatgcggtcgggccgctgcttgccatgcaggatacctatcaaacgccggggctgatgtggcgcgcgatccgcgccgactgggcctgcatgttggggttggcggtcatcaccacgctggaaacgctggccggcctattcgcggccgcgggcgtggtgctgatgatcgggcgattgaaaggcccttacgccgccttcgccaagggcaaagcctgggcgatgctgggagcgctttgcgcgatcgcggtgtggggcgtcggctttatggtggtcgccggcgactggtttatggcctggcaggccaagaaggatccgttggcggtgcaactgggggcgctgatctacctggcgcccaatgcgtttgccttgctgttcctgatgctgcagcgggagccgcgctaaacggcggcggagcggggcgcggttacagcgccttgctcatataccagatgcctatcgagccctgggcgctggtgtagcaggtctcgccacacatgctcaatccctggcgctgataaaaacgttgggcgccggtgttgcgttgcagcacctccagccacagcgtcttctgctggcgctcgatggcccgctgctgcacctgttcgaacaggcgctggccatagccgttgccggcatggcccggcaggaaatagattttctgcagctctgcgccgatttgttcggttggtgccagcaggctgtcgaagttcacccgcgcatagccgaccagggcgtcatcctcataggccaacagccagcacacgtccggctggcgcagcgtctggtccagcgcggagacggaaaaatcctccgccagaaaggcctccagctcgtgcgggtagcgccacagctcaccaaagtgggcgcgataggtgcggatgccgatatcgcgcaccagggttaaatcttccagcaatgcctgacggacggtgaacatgagtgcccctttgagtaagaaaaattacagccgttgttccagatgccggtggggcaccatcgcctgatgcagaatggcaagaacggtgatgccggcagggcggctgcggtaatagatcctatggctggcgtaaggaaaactgcgtatctcttcgcccagatcgtgaaagtgggccttacccgcttccggcatatccgccagatgatgcatgacctctctcaactgctcaagatagcggcgagattgcgcttggccccagtgctcgacggtgaaatggcgaatagccagcagatcttgttgcgcctgcggggtgaggcgaaacgcgggcatctcagtcggtttcatcggtgagcagacggttgaagaaggcatcgccgtctaccgccttaccggcgtcttcctcggcggtagcctgcgcgattttttgctgcagcgcgcgtaatttgagatcttccagcgcctggtagtcttctaccgacatgacgacggcgaccggtttgccgttgcgattgatttgcaccggttcacgctgcgccttgagcagcaaatcgccgaattgggttttggcctcgttcgcggtgagtgcgtacatttaatcgctccagttaattaaatcgttcgattcaatcattatacggcgcgatgaaaaaatcaccaatgttattccggcgggcaggtttcgttggacagatgccgcggcgtttcgcggcgaaagcccaggccgatgatgcggccgaacaggcgaggcagccagcggctgttgccgacgcgggcgatcaggcgtgagccgcccgccgcgcggcgctgacccggcttacgctgactcattttgatctgcaaaaactggatggctcgggtgggaaattcgcgccggcgctgcacgctcagcagatgcttcagctgcagccgatgctggcgcagcggcgggatcagggcgttggcggcggccaccgcgtcctgaatcgccaggttgacgcccacgccgccgatcggcgacatggcgtgcgcggcgtcgccgatgcacagcacgcccggtttggcccagcgatccagacgatcgatgcgaatgctcagcagttttacctgatcccactcgaggatctcctgcaggcgatcgtcctggaatggcgccacctcggcgaggtgcagcaaaaatttctccagcccgctgcggcggatcgcgtcgaagctgcctttgtcgatcgaatagccgcactgccagtagtcgccgcgatcgatcatgatgaagttttgcttcggcccggtgtggcccatcgaccaggccggatcgcccggctgcttgctgagcttcatccacaagacgtcgcgcggggcgccgaaggagcggctgctgagcgccgcctgctcgcgcaccaccgagttgcggccgtcggtgccgatcaccagccggctgcgcacgcggatcgggccctccggcgcgtcggccagcacgccgcatacctggccgcggtcatacagcagcttatgaacctgcgtcgaggtgagcagcctgaaatgggggaaggcggcggcctgctgcgccaaaaagttgagaaactcccactgcggcataaaggcgataaatttgcagcgcgtcggcaggcggctgaaatccgccagtttgatgtcgcggccggcgacttcggcatgcagggattccgcgcgttggtgcggcaacgtcagcagttcgtcgagcaggcccaactgatgcatgacttccagcgtcgacgggtgaatggtgtcaccgcgaaaatcacgcagaaagtcggcgtgcttctccagcaccgtcacgtcgatccccgcccgcgccagcagatagccgagcatcagcccggcggggccgccccccacgatgcagcaggtggtggcgtaaggtgtgatcggtgatgacggcatggtggttgaccccggagagcggcccgcatcccgtgagccgcaagtgaacgtttagtattgataatgattatcaatatcaagtttggctgtcaacccgcggcgcagtgtggtcaaagggggcggacagatggccgacgcggaacagctggccgttttgcggccctacctgcggcggttcacgccataaatccagccgcactaaccgccactcggcggggtcgaacgccacgatggaggccagcgcgccgggcgccgcctgctgttgccgacgcaatgcaggcagatcgctgtaggggatgatggcctgttcctggcaggttgcccaggcggcctcggccagatgagggcgatcgaaatgcgtcagccacggcagccaatgattgacgcgcggccagccgaacgcctggctgaggcctctgaaaccttcgccggccaggaaatcgttcatgccggcgctgctgttccacaggtagaagggagcgtagagattttcggcgctgccttcgctgcgctgcgcgtacagataggctttgacgatcagctgcgggcaggcgtcgagccgatggccgaaatcggcgatgcggcggcggacgatcgccatgtcgtaatcggcgggcagggtgaaacggtattgcatcgcgagcataaggattctccgcaaagacattgaccgggagagcgtgacacgccatctttatcagtaaaatcggtattattttgattgatggttcagaaaatcaggatggtcagcatggggcgaatcacgttcgatctcgaggatttgcgcagcttcgtcaccggcgtcgagctgggcagcttcgccaaggcggcggaacggctggggcgttcgacgtcggcggtcagcgctcacctgaaaaagctggagcagcaggttggcgcgccgatcctgcgcaaggccggacgcggcatggtgatgaccgaggcgggggaaaccctgctcggttacgcgcgccgtctgctggagctcaatgacgaagccgccgccgcggtgcgcgggttggatctgcagggcacggtgcggctggggctgcaggaggatttcggcgagacgtttctgccgcaggtgttgggcagctttgcgcgtgccaatccgaaggtgcgcatcgaggcgcgcatcgcccgcaatgccgaactgatcgactgggtgctgaaaggccagctggatctgtcgctggcgtgggacggcggtttgagcacgccgtttcatcaggcgctggggcagcggcagttgcactggatcgcgtcgcccggcttcgcgctggcgccgtggcgagaaggggatgagccgttgccgttggtgatgttcgacgcaccctgtctgatgcgcagcgcggcgacgcaggcgctggatcgcgccggcattccctggcgcatcgcctttaccagccgcagcctgaacggcgtttgggcggcggtgagcgccgggttgggcgtcacggtgcgcacggcggcgggtttgccgcccggcctgtcaccgttggcgcccgaactgctgcccgttctcggccagctcggcgtggtgctgcaccgcgccgaggatcagccctcggcggccgtgcagcggctggcgcagatcgtggtcgagcggatcgaaacctaatctttggcgatgggctgtttgccgctcagttggccccattcgctccaggcgccgtcatacagcttgacctgcggggcgccgagcgacagcaggccgaacgccagcaccgccgccgtcacgccggagccgcagctggtgatgatcgggccgttgatatccacgcccttgtcgctgaaggtttggcgcagcgcctccagcgatttgaagcggccgttttccagcagctcgccgtacggaatgttgatgctgccgggaatgtggccgcggtgcaggccggggcgcggctccggcgcttcggcataaaagcgcggcgcggcgcgcgcgtcgagaatttgcaccggcgtgcctaacgcctgttccacttgccgcatatccaccaccgcgtcggcgttgaaccgggcgttgaacgcctgcggttcaggctgcgccgggccggtggccagcgcctggccctgcgctgtccagccgttcagcccttcgtccagtacgtaaacatgctgggcgccgaaattgcggaaggtccaccagccgcgcggcgcggagaactggttaccctcatcgtaaatcaccagggtatcgcgctcgctgatgcccagcttgcccaccgccgcgccaaactccgccgccgtcggcagcatgtgcggcagcgcggtgtttttgtccgccacttcgtcgatgtcgaaatagaccgcgccggggatatggccgcgttcgaactcggcaagcatgtcctttttcggcgttagccccaccggcgacatccggacgtcgatcaccaccagattttcatcgttgatatgttgcgcaagccattgaggggtcaccagaaacggagagttcatcgttattgttcgcctgttgtgaaaacggattttcactatacaccaggccgcgcggggatgaagtatgatgttcagtcaaaggcaatgggcagggagcggaaaaatcatgacggacgaggcgtttggcggggccaagatcgcgctgctgtgcgatggtttcctgctggtttaccaacgggacgataaaccgggcattccgtggcccggcctgtgggatctgcccggcggcgggcgggagaacggcgaaacgccgctgcagtgcgtgcagcgggagacgcaggaagagttcggcgtggcgatcgccgaacgtcaggttgtctggcggcggcgctacgacggcattttgcccggctatccgccgacctggttcatggccgggatgatcactccggcgcagatcgccgccatacgtttcggcgacgaggggcagcgttggcggatgatgccggtggagcagtttattcaccatccgcagggtatcgaacacctgcgccgccgggtggcggagtattggcggcagggcggttaaccccgttgttcaggatgccgccagccggttgatctgcgccggttcgatgatgcgcagcgcgctttcccgtcgcgccaccgccagcatcgcccgcccgattcgttcggtgctgcttacccgggcgggaaacagccgcaatgcgccgagccacagcggcttgaacagccgataggccagatcgtagaggcgggttttggagcgaatgccgtgcagcggcacaatggcgccgggacggaacatcaccgcgtggaacggcagcgccagcagcgcgttttcggtggcgcccttgaccctggcccacatgctgcggccgcgttcgctgctgtcggtgccgaggccggagacgtagacgaagatcatcgacggattcagcgtcgccaacgggcgggcggcggccagcgtcagatcgtaagtcaccgcgcgatattcagcttcactcaggccggaggacgaaatccccaggcagaagaagcaggcgtcgtagccggcgagctgcggctccagcgccgacagatcacgcagatcgggcacagaaagctggcgcagtttggcgtggctctgggccaacgggcttcggccgatgctgagcacttcgctgacgcgcggatcgtgcaggcattcccgcagcgcgccctggcccaccatgccgctggcgccgaaaataatcactttcatgctctgttctcccactggccggcggcgcgctgcgtgcgccagcggctgggcgtcagcgtttcccactgaataaaggcgcggctgaacgaattcagctcttcgaatcccagcacaaaggcgatttcgcccggttcaaggtcggtttccgccaacagccggcaggcggtgcggtggcgggttttgtccaacaattgctggtagctgtagccgtgctgttgcaagcggcgctgcagcgtgcgcgggctgagatagagttcagcggccacgctgttgacgctggggcgctggccgcgcatgctgcggctgaggatcgccatcacctgcgtgggcagatcgtgcgccgactgagatttggccagctccgcctccagccccggcagcaatacggccagcatgtcctgattgtaagtgatgaacggttggtctatcagcgcgcggtcaaacaccagcacgtcctgcggggcgttgaatgtcaccgggcagccgaaatagcgcgccagcggcgaggcggcgtccggccgccgggtcaattcgatcgcctgcggctgcaggggcaagccggtgccgcgccgacacagggccgtgatggcggcgaacatggcgtcgatcagcagcgccggcgcaggggcttcgctcatggtccagcgcgtatgcaagcggatgctgtcgccgtcttcttccagcatcagctcttccgggcaaaccagtcgtttatagcgcgccaccttttgcaacgcttcgcccagcgtggcggaatgcagcgcggcgaccaacgcaatgtcatagtgttccggcgccgcctcgccgcccagacgcagaccgaaggcgggatcgtcgttcaactgcggcagactgcgccaaagagagaagaattgttgcgtggtgagtttaatcttgtcgcgccgcgcgccgaacaggccggcaggtagcccggccaatcggccgagctgctcgatatcgacgccctgcgccgccaggtgtaccgccagcgtgccggaaaccgggatttgatcgctgctcaatgcgggctccttagggttttcccgtcacgactgccgcgatggcggcgtgatccggcgagctgtcgtcgtggtctgtgctgagactgagggcgcgaaacgcggcgtcctccgcctggcgttctgccaacacctgcgccgccatatgcaccgcgtcgctgccgagcagcaggcgtagcggaggggcttccagcgccgccaactgcaggatcgcctgcgccgccttggccggatcgccggtttggctgccgttatgctgctgcaggaaggccagcatcggccccagcgtcggctgataggcttcgccgatcggcgcaatggtcattgaagaaccggcccagtcggtgcggaagccgccgggttcgaccatcgtcaccttgacgccgaagggagccatctctttggccaatgattcggagaacccttcgaccgcccacttggcggtatggtaggcgctgaggccggcaatgccgaggcgagcgccgatggtggcgatctggatgatatggccgctgccctgcaggcgtaatatcggcagcgccgcgcgggtgacgttgaacacgccgaagaagttggtttcgagctgcgcgcgaaaatcggcttcatcggcttcctccaccggcgcgatattgccgtagccggcgttgttgaccagcacgtccagccgaccgaagcgttcaatcgccgtgcgcaccgcgcgttcggcggcagcggcgtcggtgacgtcgagcgcgatcgtggcgacccgatcgccgtagcgttccaccagcggctgcagctgttgcggctgacgggcgggggcgaccagacggtgcccggcggccaacaccgcctgcgccagctgttggcccaggccgcgggaactgccggtgattaaccatacctgtgactgagacatcatgaccttcctgattgcgagtgggtgtgatgccactttagagcgccgggcagcgcagcgataatccgatcgcgtcaagatttaatccgattgcgccaaactgtcggccggcatcagccgctggatggtggcgccgaccttctgcactgccatctcgatctctgtcgtcagcgtcggcgcatagttgatgcgcaggcagttgcggtacttgccggcggcggaaaagatgctgccgacggcgatttgtacgccttgctgttcaagatggcggttcagccgcagggtgtcgaacgcctcgtccagttcgatccacagcataaaaccgccgcgcggccggctgacgcgggtgccgtccggaaagtgtttcaggataagatcggtcatgcgatcgcggttctgctggtagcgtgcgcgcatgcgccgcaggtgctgcaggtaatgcccgccgcggataaattcggcgatcgccagctgcggctgggtggcggtggcgccggagccgatgaacttcatgtgcagcacccgttccaggtagcggccgggcgcgatccagcccacgcgcagccccggcgccagcgttttggaaaacgagctgcacagcagcacgcggccgtcgtcgtcgaatgacttgatggtgcgcggccgcgggtagtgataggcgatgtcgccgtagacatcgtcttcgatgatcgccgcgtcgtggcgctgcgccagcgtcagcagccgctgtttgtgggcgtcgggcatgatgtagcccagcggattattgcagttgggcgtcagcaggatggccttgaccggccactgttccagcgccatctccagcgcggccaggctgacgccggtgagcggatcggtggggatttccagcgccttgatgcccagccccttcagcgtctgcatggtgccgtggaagcagggcgaatcgaccgccacgatgtcgccgggttggcaaacggcgcgcagcccggcggagattgcttcctgacaaccggtggtgatcagcagctgatcggggccgatttggcagccggagtccagcagcagacgggcgacctgttcgcgcagcgcggccacgccctgaatgctgtcgtaatacagactgcgcaggtcgccgtggcgggcggcgttgcgcagggcgacgatcagcggtttcatcgtcggttcggcgatatccggcatgccgcgccccagctggatcaggccttcgcgcggccggctgcgcaccagttccagcacctgctcccattgcgaaatgtccaccggccgctgcaccggcgccgtcatggcgggcagctcggcctgcgcgcgctgcatatgcacgaagtagcccgacttcggccgcgcttccaccaggcgctgttcctcgagcaaccggtaggcttgctgcaccgtgctgatgctgacgccgtgctcctggctcaacgcgcgcaccgaaggcaggcgatggccggccggatacaacccttgctgaatgcgttggctgagaatggcggccagcgtggcgtagcgtgtcatacagaggcctctcatcggtggtcaggattaaaaaaccggtacagatacgttcaaaataaaccattcagcgggttttttggcgcagctgtatgaaaaaaatagcgccagcgtgaatctgtattgttttttgcctggcgcgcatcatcactaccaggcgaaaacatcaggggggataataagatggctctgtttgatggcatgacgatgtggcgacgggtaggctggtcacgctggcgttggtatttgttgcgtcgcagaacgcgcagagagttactgctgctgaacgacaggcagctggcggatatcggcctgacgcgggcggaggcctggagggaagggtataaaccgttctggagagaataaggaaagtcaatgctgaaattattgggtaaagcctcatcgatcaacgtgcgcaaggtgttatggacctgtcaggagttggggctgacgctggaacgggaggactggggcagcggttatcgctccacgcaggagccggcgtttttggcgctgaatcccaacggcctggtgccggtgctgatcgacggcgagcgggtgctgtgggagtcgaataccatttgccgctatctggcggggcgggaagggcggcaagatctgctgccgcaggcacccggcgcgcgcgcggcggtggagatgtggatggactggcaggccaccgatctgaacggcgcctggcgctacgtgtttatgtcgcgggtgcgtgggcatgcggattatcaggatgccgccagcctggcagccgccgagcgcgaatggaaccggctgatgggcttgttggacgcacatctggcgcagcacggcccttatgccgccggcgccgccttcacgctggcggacgtggtgctggggctgtcgctgaaccgttggctgatgacgccgttcgagcggccgcattatgcggcgctggcggcctatcagcagcgcctgctgcaacgccctggctacgtgcagcacggtgctaacggtttaccgtgatatgaaataaacggttcatttcatcttgtccggatacgccccgccgtgtccggactttcctcattacatcatcccgtcaacgtttcatgaacggcatcacgaatatgaactttattttcctgtgtgcttgttattgaaatttatattccatataaacccgttatcaaccggcgcgtttcattgagcgacgcctggttctacgcagagttttggtcacgggagaaaatgatgaaacaggtacgcgttgggttaatcggcaccggttatatcgggcgttgtcacgctatcgcctatgcgcaggccgccacggtctttcctctgaaaggggacctggtgctggagatgctggcggaagtgacgcccgagctggcggcgcagcgcgccgccgaattcggctttgcgcgctcgaccggcgactggcggcagctggtggccgatccggcgatcgatgtggtggacatctgcgcccccaactttttgcacaaagagatggcgctggcggcgatccgccacggcaagcacgtgtattcggaaaagccgctggcgctggacgccgccgacgcggcggagatggtgcaggccgcgcgcgctaagggggtgaaaacgctggtcggttttaactacatgaaaaaccccaccagccaactggcgcgcgaaattatcgccaacggcgaaatcggcgaggtggtgcatttttacggtacccacaatgaggattatctggccgatccgcgcacgccgatcgactggcactgtcgccgcgccagcgccgggttaggcgcgctcggggatctggcggcgcacatcgtcaatatggcgcactacctggtgggcgatatcgtggcggtttccggcgatatgcagaccgtgatcaaacagcgcccggatccgcaagacccgacgcgcctgcacccggtggaaaacgaagatcaggccagtgcgttgctgcgtttcgccggcggcgcgatgggcactatcgaaacgtcgcgcattgcctgcgggcgcaagatggggttgacctatgtggttaccggcaccaaaggcacgctgagttatacccaggaacggatggcggagctgaagctgtatcggcacgatgaaccggcggagcggcaggggttcaagacgttgctggtggggccgaagcacccggactatgcggcgttttgcatcagcgccgggcacggcattggttttaacgatcagaagacggtggagatccgcgatctggtcaacggcatcgccgcgggcgatcgcatgtggccggactttgaagagggctggaaggtgtcgtgcgtgctggacgcgatagccgcctccgccgaacagcggcgctggctggagatcaaccgcgattgaaaatgaaatggcgctctcccgtggacagcgccattaatttattacgttgccagctaaatagcttattaagttaactttataataagttattggcttgataacttagaacgagaaacacgaacagccgaacgcgccccagaaggcattctcgtccgacaccgggatgctggagcggcgcgcgatgtcatgctggtgtgcatgcacgccgcacgggccgcagcattgatgcgcctggctcactaccccgacgcgggccgccgccgacggcggtgcggagcggtaatggcccggcacctgggtgaccggcgaccactccggcagcaccggcagcggcggcggcgccagcggtgagaagctgccggcggcgtagaccactttgccgtccaccaccgtcataaccgactcgatgcctttgatctgctcttccggcacgctgaaatagtcctgcgacagcaccgccaaatccgccagctggccgaccttgatctggcctttcttgccctgctcggtggagaaccaggcgctgccctgcgtccacagcatcagcgccgtttcgcgatccagccgcgcgctgtcgtcgtacatcgccatgccgccgacggtgcggccggaaaccagccagtacagcgccgtccacgggttgtagctggcgacgcgggtggcgtcggtgcccagcccgaccggcagctcggccgccagcattttcgccaccggcggcgtatgtttggtggcttcgatgccgtaacggtcggcgaaatactccccctggaatgccatgcggtgctggactgcaatgccgccgcccagtgccttgacgcgctcgatattgcgctcggtaatggtttcggcgtggtcgaacagccagtgcaggccgttgaacggaatatcgcggttcaccttctcgaacacgtccagcatgcggctgatggattcgtcataggtggcgtgcaggcggaacggccagcggtgctcgaccagatggcgaaccactcgctccagttcgtcttcggtgcccggcggcagatccgggcgcggctgcaggaagtcttcgaagtcggcggcggaaaacaccagcatctcgccggcgccgttgtggcgatagaagtcggtgccctggcccggtttgagcatatcggtccacagctcgaagtcttccagctcctgtttaggccgctgggtgaacaggttataggcgatgcggatggtcagctgctttttctcgtgcagctcggcgatcacctgataatcttccgggtagttctggaagccgccgccggcgtcgatggcgctggtgaggccgaggcggttcagctcacgcatgaactggcgggtggagttgacctgctgctccagcggcagcttcggccctttcgccagcgtggcgtacaggatcatggcgttgggtttggcgatcagcataccggtcgggttgccgttggcgtcgcgctggatctcgccgcccggcgggttcggcgtgtctttggtgtagccgaccaccttcaacgccgcgcggttgagcagcgcgcgatcgtagagatgcagaataaataccggcgtgtccggcgccgcctggttgatttcgtccagcgtcggcatgcggcgctcggcgaactggaattcggtccagccgccgaccacccgcacccattgcgggctcggggtgcgcagcgcctgttctttcaacatgcgcagcgcgtcggccagcgagggcacgccttcccagcgcagctccaggttatagttcaggccgccgcggatcaggtgcaggtgcgagtcgttcaggccaggaatggcggtgtggccgtgcagatcgatcacctgggtttccggcccggcgtgctgcatgacttcgctttcgctgccgaccgccagaaacttgccgtcgcggatggcgaccgcttgcgcggtggggtgttggcgatcgacggtgtgaaacttgccgttggtgatgatcaatgaagcgtggtggttcataacattctcccggcgaaccgcctaacggcgggtcagccattgatgaaaaacgcgagtcacgataggcatccacaggtacaccaccagggcgaccacggtggcgtcattgagaaaatggccgagcagcgagccgtccagctgcggcagcacccgtccccaaaaccagggcaccagattggtggatggaaagatcaccagtagggtaatgatgaattgcttccactggggcggctggcgcacgctggggttgggcggggtaaaccagaactctgcgccggggcggatctcgatatggtcgttctccagcaacagcggagtgacttcttcgatgtattgcttgcgctgcggcgagttgagccagcggtagagattgtcgagattgtcgaagcggaccagcaccgtataggcctgttcgtcgccggaagggcgaatcacgttgacgcctaaatggccggtgaagcctgcggcgtcgggcatgatgcggttcagccaggcctcataggcctgttcgttccccggcgccaaacggtgggtgatcaccagcgtgacatgctgcggatgggccataaaaccgactcctgaaaataccccggcgcgaggccggggcaaggggaattatttcaccgtgcgggccggtgcgtggtgcaccatggtgtaagcgtagtcgacgcccatgccgtacgcgccgctgtgttcgcgcaccagcgccatcaccgcgtcgtaggtatctttgcgcgcccagtcgcgttggtactccagcagcacctgctgccaggtcaccggtacggcgccggcctgcaccatgcggtcgatcgaacgttcgtgcgcatcgacggaggtgccgccggaggtgtcggtcaccacatacacttcatagccggcttccagcgccatcagcgccgggaaagtcaggcacacctcggtccacagcgcggagatcaccagctttttacggccggtggcttccacggctttaacgaaggccgcgtcttcccaggagttcatcgaggtgcgttcaatcggggtgatttcagggtgtaccgccagcagttccggccagatatagccgctgaagctttcggtttcgaccgaggtgaaaagggtgggaacgttgaaaatcttgcctgccttcgccaaaccaacaacgttgtttttcagttgctgacgatcaatattagccacgccgaaggccatttgtggttgatgatcgataaaaatcagtgcggaattgtctttatcaagcagttgaaacttggacataatttaccttcccagtgatatttcggttgaacatctgatgagtgtaacgccgataaaacccatggtaggcagagggcgatttcaaagataccgcagaatttttgccgacttgttgagtttttttatacacgggagaaagcatgagattaaacctggaagcgctgctgattttggacgcgctggaccggcacggatctttcgccgccgcggccgccgcactgtttaaaaccccttcggcactgagctatatggtgcaaaagctggagaacgatctcgacatcaccctgctcgatcgctccgggcatcgggcgaagttcaccgataccggcaagttgatgctggaaaaggggcgggtgctgctgcgggcggcgcaggatctggagcagcaggcgcgctatgtcgaaaacggctgggaaagcgaaatcacgctcgggattgacgcctctttcccgtttgcccgcctgttgccgctgatcgacgagttctatcggcagcatcaccatacccggctgcgtttcagccacgaagtgctggccggctcctgggagtcgctggtctacggttgcgccgacattatcatcggcgccatctgcgagccgccgtcacgggtgggctatgcgttcagcaggctggggcagctggattacgtgttcgccgtcgcgccgcagcatccgctggcggcattgccggaacccttgccgaaggacgaaatccgtcagcaccgggcggtggtggtgcgcgacacttcgcgcgtcaacgcgccgcagagcctgaatctgctggaagagcaggatacgctgacggtcttcggtttcgacgccaagctgcaggcgcagctggccgggctgggctgcggctatctgccgcgttctttggcggaaccttacctgaacagcggcgaactggtggcgaaacgcgttgaatcggaacgctgcagcgacatcgcctatttcggttggcgggaaagcgccagcggcctggcggccaaatggtggcgcgaacggctgcagcgctacgcggacgacggcgaggcctacccggcggcgcagtgagggccgctcgataaggataaatcccccaataaggacatcgggaatgaaaaagacactaagcctgttggcgttgttgctgctgagcggctgcggcgccgggcgtgaggccggcataccgttgccgcaggccccggcactggccgcaacgcagctcagttacccggagcgggtgcataacgcggtgagccgtgagctgcgcttgccggaacatgcgcacggtcagcgttgcacccttgctatccgtttgcagccggacggcaagctggcgagcagcaagatcgtaagaggcgatgcgcccctgtgcgcagcggcgcgcgctgcggtgcagcgcgcgcagtttccgccgatggccagcgctaccgaatacgcgctgttcaacgccgtggtgctcgatttcgttccctgaagggatatgaccgacgggccgtctgcgcggccaatgcttgtcagttagcgtttttttgaagtactcgtgacgttttcggtcgataaatgagaggtgcatcatgaggctcctgcacctcgaccgagccaggggccgaaaggcgcggcccctggcaacccgcgcctttgccctatcagacggttggctttgccaacgttactcagcccatccctgggcctcgccccttcggggccgctgcaagcagcgttcaaatctgctccaggcagatttgtcctcgctccgccataccgcattgaggccggttgcgacaggcgtccctgcctgtctcacctgaaaccgccgtccatggcggtttcgcctaatgcgctatgcctgcgttcggcgtcttcaagggcgtccaataccgtgctcatctccgattcgtcttctttgcgatatatgggttgcccggtagctgccagctcgggtgttgacctttggcgcgcatcaccggctgccggcaagacagcgttgtcaggggcaaccggccagggaaggccggttgaggcgagactaacagggacgtttgtcgtagccgacccgcccgacaatgcagacgcggcgagggcatccgcacagcggacagacggtgttaagcgaaggcgcgggtggaggggccgcgccttcggcccctccaattgccgttcattgtagtaacacagaaatgcggaacatttacggcaattcaggctacacaaaacacacaaagatgggataaaaaatgccagtcaggtttaactgactgatattaccgcctgcgcggcccgttttttcgctttgccgcgtacgcaacccgctgaattttcacttagctttgccattttcgttattttgaacgtcactgcggctcaccgatactgggggaaaatccccaaccgcgagccgcagcatgtcccacgcccactatttgcaccctgaacaacgcgaccggatccggcggcttcatcggcgctggcactggcggctggagttgcccacctgggggatcatggcggcggtgtacggcggctggtttggcgtggcgcattattggcaggcgctgggcccgtggcttggcgcgccgctgctgatcctgctgaccaccgggtatatgtcgctgcaacacgagctgatccacagccatccgacgcgctggccgcgcgtcaatcagctgttcggcttgttgccgctggcggtgtggtatccctacgggctgtatcgggattcgcatctgcgccaccaccgcaacgaccacctgaccgatccgcatgaagatcccgaaagttactacttcagcgccgcgcagtggcggcgttatccccgcctgctgccgcggctggccgcggtgcgcaatacgctgatcggccgggtgctcctcggcccggcgctggatatcgtcaccacgctgttcggcgcagtgaagacgcttgcagcgggcgatctgcgcgcctgggcgatgtggctggcgcatctgtcgctgttggcggcgctgctgcactggctgcagatgcagggcatcggcgcggcgttttacctgttggccatcagctacccggcgctggcgctgaccaaggtaagatcgttttttgagcatcgcgccgtggacgcaccgcaggcacgttctattattaatgaggcgggctggccgtggcggctgctgtttctcaatctgaactaccatttagtgcatcacgatttgcccggattgccctggtatggcctgcgcgaagtctatctggcggaacgcgaggcgtatcagcgccgcagccagggatttgtcgcgcagggttatggtgagtggctgcgcgattacgcgctgacgccgatcgacgtcggcgtgcatccgctgagcgccggcgagcggcgggaggaacgcggtgcccggccgaagaaaaaacttattgcgcgctggaagcgcgtttctcaggattttccaaccgaactggcccatgagccagaaaacatataaccagaggaaaagtatggcaatcaccttatcacgcggacgttcctttgccgtcgcgctggctctgctggccgtcggcggtctggcacaggcggccgactcggtgcgcgtcggctccaagatcgataccgaaggttcgctgctcggcaacatcatcgtgcaggtgctggaagccaacggcatcaaaaccaccaacaagctgcagctcggcaccaccaaggtgctgcgtggcgccatcacttccggcgagatcgacatctacccggaatacaccggcaacggcgcgtttttcttctccgatgagaaagacccggcgtggaagaacgcccaggccggcttcgagaaggtgaagcagctcgactacgacaaaaacaaaatcgtctggctcgatgcggcgccggccaacaacacctggaccatcgccattcgtcaggacgtggcggacgccaaccatctcaaaacgctggcggatctcggcaagtggatcaacggcggcggcaagttcaagctggcggcctcggcggaatttatcgagcggccggatgcgctgccggcgttccagaatgcctacggcttcaagctgaatcaggatcagctgctgtccctggctggcggcgatacggcggtgaccatcaaggcggcggcggagcagacctccggcgtcaacgcggcgatggcctacggcaccgatggcccggtggcggcgctggggctgcagacgctggcggatccgaaaggcgtacagccgatctacgcgccggcgccgatcgtgcgcgaagcggcgctgaagacgcacgccaatctgcctgagctgctgaagccggtgttcgcctcgctggacgggccgacgctgcaaaaactcaacgcgcagatcgctgtggaaggccaggacgccaaacaggtggcggccgcttacctgaaagagaaagggtttgttaagggataatgccgaggtgccccctttgccgtcgggagagggggtaaaccgagggagccggagcgtttctttgactatcgccgtaaaacatcgcgtcttgttgacgctgttcatgctgttgctgctggccgcgttcggcctgccgttcctcagttatgcccccaatcgcctgttgtcgggcaaaagcctctccttgttctccctgctgcacggcccggcgctgtggctgctgttgccgctggcggcattggcgatcctcagcctgttgccgccgacgcgggggcgggcgctgctggcggcgttggccgcctgcggggtgctgacgctggcgttctggatcagcgggcaggccgccgggcgtctggcgcaggagggatcgcgcctggcacgcacttcctggggcagcggctgctggttgacgatggcgctgagcctgctgatcgccgccgacgccatggcgcgtctcaccgcgtcgcacctgcggcggatgctcggcaacgcgctggtgctggtgccgccggcgctgctgctgttcggccatcagctcgatcagctgtcgctgctgaaggagtaccataatcggcaggaggtgtttgacgccgcgctgttgcagcacctgaccattctgctggcgacgatggcgccggcgctggcgatcggtgtgccgctcggggtgctgtgttttcgttccgagcgctggcagcggccgatcttctccgtgttgaacattatccagaccgtgccgtcgatcgcgctgttcggcctgctgatcgcgccgctggcggggttggcggtggcggtgccctggctggcggaacacggcgtcagcggtatcggcatggcgccggcgatcgtggcgctggtgctgtacgcgctgttgccgctggtgcgcagcgtggtggcggggctgcaaagcgtgccggccggcgtgattgagtccgccaccggcatggggctgacgcgcgggcagatcttcctgcgcgtgcagctgccgttggcgctgccgctgttcctgaccggcgtgcgcattctggcggtgcagaccgtcggcatggcggtggtggcggcgctgatcggcgccggcggttttggcgccatcgtatttcaggggctgctcagcagcgcgctggatctggttctgctgggggtgatcccggtggtcatgatggcggtcatcgtcgattcgctgtttaaattttgggtttcaatcctggacgtatcgcgccgatgattcactttgagcaagtcagcaaaatttttcagggcaagccggcggtggacgatctcacgctgcacatcgccgagggcgaattcaccgtgttgatcggcacctcgggttccggtaagtccacgacgttaaaaatgatcaatcgcctgatcgaacacgatcggggcaagattctctttgccggcgaagagatccagtcgttcaaaccgcaggatctgcggcggcgcatgggctatgcgatccaatcgatcggcctgtttccgcactggacggtggaggagaacatcgccaccgtgccgcagctgctgaaatggccgcgcgcgcgcattcgcgatcgggtgaccgaactgttggagctgctgcatctggagccggctctgtttcgccgccgctatccgcaccaactgtccggcgggcagcagcagcgggtgggggtggcgcgcgcactggctgccgatcccgaggtgttgctgatggacgaaccgttcggcgcgctggatccggtcacccgcgcggcgctgcaggcggagatcgcgcgcatccatcagctctccggccgcactatcgtgctggtgacgcacgacatcgacgaagcgctgggcctggcggatcgtctggtgctgctcgatcaggggcgggtggtgcagcagggcacgccgctgacgctgttgaccgccccggccaacgatttcgtgcgtgatttcttcgggcgcagcgatcgcggcatcaagctgctgtcgctggggacggtggcggagcgggtgcggcccggtgtcgccgggggcgagccgatcgccgccgccatgagcctgcgcgaggcgctgtcggtgttcgtggcgcgcggcagcgactgcctgccggtggtggatgaacggggcgaagcgttgggggtgttgcacttcaacgatctgatcgccgggcaggcgctgtcatgagcgggcgcatcgggcgcctgctgcgcgatcctttgccctggacgctggcgctgctgttggcgctggtgttcggcatggatcatctgcgcggcctgttcgccgcctggttccccgatctggagcggcccatttatcagcaggacagctttatcgcgctggtgggggcgcacctgtcgctggtggcgatctccagcctgattgcggtggctctcggcgtggcggcgggcgtcgccgtgacccgacgcggcggccgggagtttcgttcgctgctggaaacggtggtggcggtggggcagaccttcccgccggtggcggtgttggcggtggcggtgccggtgatgggcttcagcgagcagccggcgatcatcgcgctggtgttgtatggcttgctgccgatcctgcagggcacgctggcgggcatcgaatcggtgccgcccgccacgcgcgagatcgcccgcggcgtggggatgagcgcctggcaaattctgtggcgggttgaactgccgctggcggcgccggtgatcgtcgccgggatccgcacctcggtgatcatcaacatcggcacggcggccatcgcttccaccgtcggcaccaagacgctcggctcgccgatcatcatcggcctgagcgggtttaacaccgcctatgtgatccagggcgcggcggttgtggcgttgttggctattatcaccgatatgctgttcgaacgttgggtgcgttatctcaccgcctggcgtcagcagacgctggcgaccactccggcggggtaagggggaaatgatgcaggtgtctctaccgatgtacggcgttggccgggagcaggccgaatccttctggcaggtgttgcgcgacaagctgctgcggctggggttgccggcggcgccggaacggctcagctggccggacgatctggcgcagcactggcgacgcgaggatctcttgctcagccaaacctgcggttatccgttggtcagcagtctgccgcagatacagttgatcggcacctatcattatcgggtggaagggtgcgacgggccgaattaccgcagctggctggtggtgcgcgcggacgaccccggcgagcggctggcggattttcgcggccgaacggcggcgtataacagcaccgattcccagtccggctacaacggcctgcgcgcgctgatcgcgccgctggcgcaggacgggaaattcttcggtgcggctatcgcctccggcgcgcattatcagtcgctgcagctgatccgcagcgggcaggcggatatcgccgccatcgattcgatcagcatggaactgctgcgccgcgcgcaaccgcaggcgctggaggggctaaaaatcatcggccgcacggcggcggtgccgggcctgccgttgatcaccgcagccggcacgccgccggaacaggtggaaatcctgcgcgccggcgcccgagcgatgctggatgaggcggtcagcgaccgcctgctgatcggcgatttcagcctggtgccgcgttcggcctaccagattatcaccgtgctggaacagcaggccgccgcgcagggcgtgacggcgctctagccgccgttacagcaggccgccgccgtcgatgtcgatcacgctgccggtgacgaagccattctccatcgccagcagataacccgccgcgacgtcggccgcctgcccgaccctgccgaccggcaggctgacgccaacccgttcgaacagcgcctgacgctgtgcggcgctcatgccgtcgtaggcttcggtggcggtgatgccggggctgaccacgttcacccgccgcggcgccagctccttcgccagctgtttgccgatcgcttccagcgcggcgttgatggcggttttgaccaactgaccgttgaggtatttacgcgacagctggccggaggtcagggtgatcgagccctgtggcgccagcgtcggcagcgccgcctgcaccgcgcgcaaacttccccagaatttgacgttgaagtcggcctgcgcctgttcaagggcggtctccgccagcggcttcgcgtccaccaacggcccggcggtgatcaccaaatggtcgaaagcgccgacggcggcgaacagcgcgcgcagcgacgcgtcatcggtcagatcggcctgcatcaggcgcagcgcgtcgttcttctccccggcgtgagggagacgacgcgaagccagcaccacttcagcgccacgcgccgccgccgcgtaggccaccgcggcgccaatgccgctggtgccgcccaggatcaccagcttttgtcgtttcaggggggagtcgggaatcgtcatgttaaggcctctttttaggtaagtttcaacgggatctatctttcctgattgaaaatgaggaaaaaagtccgcctaatagcaaacacttgtaaattaatattaataattgattgggctaaaaagagagggagcagatgacctcatttgtcgatctcgaggtgtttgtccgcacggtggacggcggcagtttttccgccgcggcgcgcgcgctggatatcacgccggcggcggccagcattgcggtgaaaaggctggagcagcagttgggcgcgcggctgctggtgcgttccacccgcagcctgaggttaacggaggagggcgcccgctatctcgacagcgcgcgcctggcgctgggggcgttggccgaaggagagcaggcgatccgcgagaagcatcaggggctgtccggggtgctgcagatttccgcgccgtcggattttggccgcaatctgctgctcggctggctggacgagtttcggcaacagcatccccacattcagctgcagcttctgatcaacgatcggcaggcggatctgttccgcgaaccggtggatgtggcgttgcgtttcgggccgctggccgactcttcgctggtggcgctgccgatcctgccgcagcatcggcggctgatctgcgccagcccggattatctgcggcggcatggcgcgccgcaaacgccggccgatctggttcggcacagcattctggtgtatcagcccagcggcaaacggcaggtggaatggcggctgtggcgcggggaggagctggtcgagctgccgctgaacggcagctattttaccgatgacggtgaggtggcgcggcgctgggcgctggccgggcacggcgtggtccgcaagtcggcgatcgacgtggcggcggatattcgcgccgggcggttggtgcagctgttgccggaatggcgcagcgacgcggtgccgatcaatctggtctgcccgcatcgttcgcaggtgtcggagcgcgtcaggcaactgcagcgctttttacagcagcgctgccagcgctggatggacgatcacttggcctgaagagtttcggtttgcgccggcgtagcggcggtatccccggcaggcgcgctttcttcgtgcggggtggtggaacgggtgtagatgttcagcccggcgaggaatacgccgcccagagaaccgaaggcgcacagggcgatgacgatgacgaacgcttttttcagcataggaataatttcgcaggttgcttggaacagcgggaattatagccccttcgccgggtgaaacaagaatcgtttttaacggcggcccgcagaccgccctttgtgatcaccgccgttcgcagtcgatggcctgcacgttggccgggcgggcgaacaggtattttcccagcgtcaccagcaccaccgccgccacgatgatcaccagcgccagccactcgcgcggcgccagcgattcgccggcaaaaccgatgccgagcagcaccgccaccaccggattgacgtaggcgtaactggtggcgaccgccgggcgcacgttcttcaacaagaacatataggcgctgatcgccagcatcgaaccgaagacgatcagatagcccagcgccagaaagccgccggtgctcggcatctgagtgaggcgctcgccgctcagctggctggctgccaataacaccacgccggcgaccagcatctccgccgcgccggccatcggcccggccggcagcgagatgcgcgatcccaacaccgatccgaaggcccagctggccgaagccagcaaaatcagcagcgcgccggtcgggttgcccaccaggttgttgccggtgttgagcagcacgatgcccaccaacccgagcgcgatgccggcccattccagtttggtgttgcgcatgccccacagcaggctgaagcagagggtgaacagcggcaccgtcgccaccatcaccgcggcaatgccggagggcacatgttggtgttccgccaccgtcaccaggccgttgcccaccgccagcagcagaatgccgatggcgccggcggccagccactgcttcagcgtcggcagggcgtggccgcgccaggccaggaaactgaacagcacgataccggctgtcagaaagcgaatgccggccatcattagcggcggccactgcgcgacgccgaggcgaatgacgaaataggtggaaccccaaacgatatataacgtgaacaacgccccgatcaacggcaggacgctacggctttgttggctaagcataggattgtattttgcgggaatgattattattagaacgctcagtaaacccgatcgggcaaccgataagcaatggccttcggcattatttttccggcggctgaaagccgttcaatggccttgctgtttccactgcaaccagctgacggccggcaggtaaatcgaccagccgacggccagcagcagcagcatgaactcgggcggcacgccgggcaacaaggcgtccagcttccaggacacggcgtaggcgaaggggccgacggcggcgcccaacaccgccagcggccagggggccgctctgaccacgtccagcaaccaataccaccagcagccgaagccgatccacagcgcgatggtccagagcggcaggccgtgttgcccgctgtagtgcagcacgccgctgtagctccacagcccatccatgccgataccgcccagggcggccagggccgcgcctttgcggcgggcggcaggggtaaagatcagcgccagcgccgcgccggccagcagtatgccgttgagccgatcgcgagtcagcagcgccagcagccagcaaacgcccagtcccagcgtcgccagccagaatccggcatgcggcttcttcatcgttcaactcccgtggggttactctgccgctgcgccaagcgccgacggatttgccagagcgggcgcgaggcccgctgtttgcctgaatgttcgttagttcaaccttagaagggaaggtgcggggtgcacaagcagaataatctgtaccggttgaaaacgtgggcaaaaaccggtgttacaggcgggaaatccggtaggcgcagcggcgcgagccggccagaatgtgttcggcgcgctccacctgcgcctgcagcacttcggtgaagatgcttaattccgcccggcagaagccctggcagacggtggcggcggcgcagatcgggcagtggttttccaccagcagataggaaccgtcctcctcctggcgccattcggccatatacccttcgcggcagcggatctcggtcaggcgcgccacgcgttcgcgcagctcggtggcgccgatcatcgcctgcttgtagttgatgcggttttcctgctcgcgggtctcgatcagcacgtcgatcgcttgttcgcccaacttgtcgcgcacggtgcgcagcagctgcaccgtcagatccgcatgggtatcgggaaagcgcgcgttcccggcagaggtcaaatgccacagctgcaccgggcggcccacgccgcgcgtttccgccaccgcttcgaccaacccctctttcgccagcttgacgaactgctggcgggccgcctcaccggtggtgccgagcacctttcctgcgtcagaagctagctgcgggccgcgggttttcaataacgtcagcaagcggtcactgaccgattgtgcggtgctgccgctattttccaagtttattcttgacatatttctccgcctcgccctaacttattccaagataactcttgttaaatttaacgcaatcttatgaccaactcaatgccattcctctgaaaacaggacgacaaccgtgataacccatgacgacagccgctggagcgaccttttctccggcaaaaatgcggccagtgcgatcgcgctttcgctcggcgtggcgctgcatgccatcaatattctggtcgccaccaccattctgccctcggtggtgcaggatatcggcgggctggatctctatgcctggaacactacgctgttcgtggtggcgtcgatcctcggctccgcgttgtctgcccgcttgctcagcggttacggcgcgcgtagcgcctatctggtggcttcgctgttctttatcgtcggggcggcgctgtgcgcgctggcgccgagcatgccggtgatgctgatcggccgcacggtgcagggcttcggcggcgggctgatctttgcgctctcctacgcgatgatcaacctggtgttcgagcagcgattgtggccgcgcgccatggcgcttatctcggcgatgtggggcatcgccaccctggtggggccggcagtgggcggcatttttgccgagctgcacgcctggcgttgggccttcggcattctgctgccgatcatggcgctgtacgctgcgtttaccttcctgatcctgcccaaaggcaaggcgcagcaggcggccgcgccgttgccgactgcgcaactgctgttgctgaccgtggcggtgctggtggtgtccgccggcagcctggcgcacagcgtctggatcaatctggcgggcatcgcgctttcgctggtgctgatggcctggctgatgaagcgcgaggcgcacgcacgcgcgcgcctgttgccgcatggctcgctgcggcgcggctcatcgctggcggcgctctatattacggtctcgttgctggtgatcggcatgaccagcgaaatcttcgtgccctatttcctgcagctgttgcacggccagtcgccactgatctccggctatatcgccgccaccatggccgccggttggacgttgtccgaaatccttagctccggctggcgcggggcgggcattcgtcgggcgatcgtcagcgggccgctgttcgtgctggtgggcctgctggcgctggcgatcctgatgccgacgccctccggcggtgactggcaggcgctgaccccgatcgttatcgcattgtcgctggtagggttcggcatcggcttcggttggccgcatctgctgacgcgcattttgcaggtggcgcctgaagcggacaaagatatcgccggcgcttcaattaccacggtgcagctgttcgccaccgcattcggcgcggcgctggccgggatgatcgccaatctggcggggctgaacgatccgggcggcgcggcgggcgcggcatcggcggcgcgttggctgttcctggcgttcgcgctggcgccgctgctggcggtattcagcgcctggcgctgcgccgcgatcgcgccgccgggcgcagagacgggcaattttgtacaaactccgccctcgcgcgagtgctagaacgcttctcctcattcggcgatgtttgcggtgatcctggcgttcttcctgcgcgatattttttaaaatccgcttgctatatctctaatttgagattatttctcttatatgggattttcaagcggagtgtgagcggtggataacggtttggagactgccgacctgaggttggcgcagcggctggcggatttgcgccagcagcgggcgtggtcgctggaggaattggcgcagcgcaccggtcttagccgggcgacgctctcgcgggtggagcgcgccgagaccagcccgacggcgtcgttgctgaaccggctgtgcgccgcttacgggttgaccatgtcgcgcctgttgagcgaaatcgaagacgagccgccggagctgctgcggccgcagcagcaaccggtgtgggtcgatcgcgccagcggttttcaccgtcgctccgtttccccgcccgccgcgctgtataaggccgagtttatcgaagcccggcttgatgccggcgcgcagatcgattacgacctgccgtcgattccggcgctggaacatcacctctggttgctgtccgggcagttggaattgaccctggaagggcgcgttttccggctgtcggccggcgactgcctgcgctaccgcctgttcggcgcctcccgtttccatgtccccggcgatgagccggctcattacacgctcgttatctgtaggccatagccatgattgaattgcaacagtgggatgccgctgcggcgcaaagcgccattgccgacttggccgagatgctgcacgccagcgtggcgcacggcgccagcatcggttttgtcatgccctttacgcaggaacaggcgcaggcattttggcagggggtgctgccggctctggcgcggggagagcgtgcgatgctggtggcgctcgcgaacggccgaccggtcggcaccgtgcaactgctgctggcgatgccggacaacggccgccaccgcgcggaagtggtcaagctgatggtgcacccgcaggcgcggcggcagggcgttgcccggctgttgatgcaggaagtgcaggcgctggcggcgcgtcatcgccgcagcctgttggtgctggacaccctgagcggcagcgcggcgcaggggctgtaccgccaattggggttcgaggcggcgggcgacatcccgcaatacgcccgcgccagcgacggcggggcgttggaggccacctgctatatgtacaaactgctgtgaggcttagcgcccgcgccaggccttgagcgcctgttggcgcacctgcagcttctgttgcggcgtcagcttgttgtagtcgcgagccaggccgctctcccaatcgccgtacagtgggttgggcagcacgatgaattcggtgccgaatttgttctggttctcgctgacaaacgctcggcgctgcgcattatcctggtggtaggtcgcggcgccgaagtcgttcaggttgtcgcccgcgtacaccacgatgtcatagccggcttgtttgatggcgtcgaagcgcgcctgcttattggacgtgtcggtactgagcaagacggttttttccgacatgccggtgaaaccgagcttctgcatgttggccaccgtggcggcatattcgctctgtttgcggttcgagacgtagaacatcgtcccctggtgggcgttaacgtaacgggcgaacgacactgcccccggcaccgcgccggcctgttcggcctgcgtccattgggcccaggtggcgccgtcatacggctggccctgctgcgcctgccaggcggagtaggcgctgttgtccagcatggtttcatccagatcgaccaccaccgcctttttgcggcccggcgcggccttggcccgatcgaaggcgcgttgcgcgctgttgaacgcttggtgggccagcgcctggtattcgccggactgttggaaccagttcaccgccagcaccgactgatccgccagccgctgctgggcctgggcgtcggtgtgcggcggctgcgcgcaactggccaacgtcagcagcgcgacgccaaccgccgcgccgagggtgagtttccttgcctgttttcctgccatcgttatctctctcggttttatttttgtgggctgtccagcagcatatccatctcgaactggcgcaggggatcctgccgccagccaagatgcgtaaagaagggggcggccacctcgggcacaaaaacgttggcggtcagcggcaaaggggcgaaccgcgtttgcagggcggccagcaaggcgcgggcatgcccctggccgcggtgctgcggcggcacgtagatcaggcgcagccagcagtgctcggcgccgggcatcaccacggcgtaggcctgacgattgagcgtataggcttgcggtgtgcctggcagcttgaacagcgattcgggagcgatcaaccagggcagatcggtggcgccttccgccgtcaggcgatggctgacggtcagcggatcgaccgcctgcagcgccgccgtgcctggcggcacttccgccggcgcctgatggccggtcagggtgcgcacgatgcgcagcccggcgcggtggtacagcgccagcgcggcgtcgttgccttcgatcacctccagcgacagccgccgatcgccgcgctggcgggcatccgccatcagccgctgcatcagcgccttgcccagcccctggccgcgcatctccgggcgcacggaaaaggccgccacccggctgtgccggccgcggcgggcgatcagcgccaccgccaccggttcatggcggtgagtgacgatcaggctgtcgttcaggctgaggtcttcggcgcagaagcgggcggcgaaggttgaaccgtcgagcacgaaacgcacgatgtagttttcaaaacagtggttgaggatgttggccagttcgtcgctgctgtagcgcaaggcgttgtggtagtcgaagcgtccgtcgttatgcatggctgattccgctcgggggaaagctatacatgtagacccgtttgttttgcaaggcaagcggggggattcgccggcggggaaaataaaaacaaaaaagccggacgcagccgcccggcgaaataaaactctgggtatcaagtgacgctaaagtttgcagtggtggttattcattcatcacatcagaactggtaggtcagggcgacaacaacgacgtcgtcgtttttcagacccagcttgttgtcgtcatcaagctggttgattttatattcgacataagtggacatgtttttgttgaagtaataggtcgccgctacgtcgaaatatttcaccagatcgacgtcgccgatgccttcaatatctttgcctttctgctgaacgtaacccagcgatgggcgcagaccgaagtcgaattgatattgcgcgaccaattcaatcccttccgctttattggcgaagccgctaacggaggtcgagttattattgatggtagcggtgccggaaataggcgcgatattgcggctctgcgaataagtcgcggccaggtagacattgttgttatcgtatttcagaccgccggcccagatatcggccttgtcgcctttaccgaaggtgcccgccttttgcgtggcggtgcggttggaagaggcataggcggcgcccacgctcaggccgtcgatgatttcatagctggaggaaagaccccagccgtcgccgttcgccttgctggcggagcggccgtcgttttcgttcttgccctggtactgcacggcaaatttcaggccgtcaaccagaccgaagaagttgttattacggtaggtggcgacgccattggtacggccgttcataaagttgtcggtcttgatataagcatcgtcgccgaattcagggatcatatccgtccaggcgccaacgtcgtaaatgataccgtagttgcgaccgtagtcgaaggagccgaggtccttatatttcagaccggcgaagcccagacgcgttttggtgtctttggtgccgtcggattcagaatggttggcggcgatctgatattcccactggccatagccggtcagcatatcgttaatctgagtcgcgcctttaaagccgatacggacgtaagttttatcaccatcattgccggcatcatcagagaaataatgcagggctttcacacggccgtaaaaatcgagtttgttgccgtctttattgtagatttctgctgcctgtgccgcttgcgcaagtaaaagtgccggaataataacggccagaagattacgtttcatgggttaccctgctttattcgattgaaagacgcttatcatcagttgcattgctgttttactgtgccgcctgattgttggcggcggagaatttttaccgtagtaatgtgatctatttatgacaaaaaattcattttcatgtcgaacgattaaaaaagtcgcgcaaagggtgaattttttcttcagccgatggtctgcggctggtctacagttaccgataccttgttccgctgcgggaggaatcatgcacgatacttatactttgttcggtacgcagggctgcggttcgaccatcgtggccgccgcgttggcgttgactgctttcccctggggctatgaggaggtggattacacgcaggacggcccggaacgcgatcgcctgttggcgctgaacccgctgggtcaggtgcccaccttagtgctgcccaatgacgaagtgatgacggagagtgcggcgattatcctgctgctgcacgatcgcgcgccgcatgccgagctggcgccgcccggcggttcgccgctgttgccgcgttttctgcgctggctgctgttcatcaacgcggagatttaccccaccttcacctatgccgaccatccgcagcgctggcagccgcaggcggcaggggcggaacagctgaaaaacgcggtaatggattatcgtgagcgtttattgcggcagttgaacgccgccgcaggggcgtctggcccgtggtttctcggcaagagcttcagcgcgttggatctgtacgtggcggtaatgtgcaactggcggccgggccgcgcgtggttccggcaacactgcccgcggctttacgccattgccgaacgggtggagcggcggccggagctgaatgcgctgctgagcgcccatttcgacggcgttgcctcgctggaaccgtgaaatcgccccgccgcctggcggggaaccctcccgtttttctgaaccgagagtgccgaaaatcccgattttcactcgcctcggcggcgggtagcgtaaggctatccgcaactgacaggagagtgtgatgccatcaaaatcccaggccgggcaacaggcgttcggcgagatcgcccccaagctggcgcagctcagcgacagcgtcttgtttgacgatgtctggcagcggccagagctgagcccgcgcgagcgcagcctgatcaccgtcgccgcgctggtggcgctcaaccgcctggagcaactgccgtttcatctgcagctggcgcagcgcaacggtgtcgatcgcccgcaattggcggagctcatcacccacctggcgttttacgccggctggcccgcggcggcgtcggccgtggcgcgcctgcgcgagctggaaccggaggcgccccatgccgtttagccgcatcgccctgcatcagggcaagtccgccgactatctgcaaaccttgtccgacagcctgcatcaggcgctggtggaggccttcgaggtgccgccggcggacaggtttcaggcgatcgatcaataccgccccggtgagcttatctacgatcgcgactatctcggcgggccgcgcagcgcggatttcgtgctgttttacatcaccgccgggcggccgcgcgacagcgacaccaagcggcgcttctacgggcggctggcggcgctgctggcggaaaacctgcggctgaaccccgaggatgtgatggtggtgatcgccaccacccagttggacgagtggtcattcggcggcgggcgcgcctcaatgatcgatccgcagacgtaactcgggctgacgtcgtcggcggtctgtgggacaatagcgccatcatttcgtttagataagagttgaatggcgctctcctccgcagttaaagatcagattggccagtggtacaaagccctgcagcagcaaataccggattttatttcccgcgcgccccagcgccagatgatcgccgaggtggccaagacgctggccggcgactacccgcgccatctggcgatcgaggcgccgaccggcgtcggcaaaacgctgtcttacctgatcccgggcatcgccgtcgggcgggcggagagcaagccgctggtggtgagcaccgccaacgtggcgctgcaggatcagatttacagcaaggatttgccgctgctgaagaagattatccccgatctgaaatttaccggcgcctttggccgcgggcgttacgtctgcccgcgcaacctggcggcgatgagcaccgacgtcagtcaacagggcgatctgacgctgttcctcgacgacgagctggcgccgtccagcggcgaagagcaggcgctgtgccagaaactgaccaaggcgctggcccgctttgagtgggatgggctgcgcgatcactatcagcagagcatcgacgatccgctgtgggccaagctgagcaccgacaaggccaactgcctggggcgcaactgtcactacattcgcgaatgcccgttctatatcgcccgcaaagagatcgagagcgccgacgtggtggtggccaaccacgcgctggtgatggcggcgctggagacggaatcggtgctgccgaacccgaaagagttgctgctggtgctggacgaaggccaccatttgccggaggtggcgcgcgacgcgctggagatcgacggggaaatcaccgcgctgtcgaccaacctgcagctggacatgatcgtgcgccaggtcgaacagtgcatgacgcagtatcggccgaagaatccgccggggctggccaacagcgaacggctgaaaaaccattgcgaggagctgcgcgaactggtgcagatcttcgagcatcaggtcagcgcctacctgcccggcgacagcgtggccgccgagcaccgttttgaaatgggcgagctgccggcggagatggtggagagttgcgcgcggctgtttaaactgaccgatgcattgcgcgggctggcggagttcgtgcttaacgatcttactgagcagaccggcaagcacgacatcatgcgcctgcaccgcgccatcctgcagatgagccgcacgctgggctatctggaagcgatgagcaagctgtggcggctggcggcgctcgacaagtcgtccaacgcgccgatctccaaatgggtcacgcgcgaactgcgcgataacgtcacccatctgtatttgcactgcgtcggcatccgcgtcagcgatcagctggagaagctgctgtggcgcaaggtgccgcacgtggtggtcacctcggccacgctgcgttcactgaacagcttcgcgcgtttgcaggagatgagcgggctgagcgagaaggccggcgatcgcttcgaaacgctctcttcgccgttcaatcacgtcgaacagggcaagattgttattccgcagatgcgctatgaaccggcgctcgccaatgaggcggagcacctcgaggagatggcgcggtttttccgcgccgagcaggcgagcggcaagcacaaaggcatgctgatcctgttcagcagccatcgggcgatgcagactttcctcagctacgtgaccgatctgcggctgatgctgctggtgcagggtgaccagccgcgctaccggctggtggaagagcaccgcaagcgggtggagaagggcgtcgccagcgtgctggtggggctgcaatcgttcgccgaagggctggatttgaaaggcgaactgttgacccaggtgcacattcacaaaatcgcgttcccgccgatcgacagcccggtgatcatcaccgaaggcgagtggctgaaatcgctgaagcgctatccgttcgaagtgcagagcctgccgagcgcctcgttcaacctgatccagcaggtcggccgtctgatccgcagcaaccaatgctacggcgagatcgtgatctacgatcgccggttgctgaccaaaaattacggttcgcggctgttggcgtcgctgccggtgttcccgatcgagcagcgcgcggtgccggaggccgacaaggcgcatctggcggcgctgaaatccgccgccgacgcggccaaaaaagagaagaagcgcggcaacccgttcgcccgcaagcggcggcgttaatcagagcagcggcggcaggcggcgcttgaccggcgtggttttcacgatcgaggtgttgctctgcgcatgctcggccaaccgatcgagggtgtggtcgagctgttccatcgagtgcgccaccagccgcacgataaagcagtcttcgccggtcaccttatcgcattcgaccacttccgggatcgcctgaatcagctgctcgaccttcttcagcatgcccggcagcggcttgatgcgcaccagcgactcgaaggcgtagcccaccgcctgcagattgacgttcagggtatagccctggatcacgccgctttcctccagccgccgcagtctttccgacgtgctcggcgacgacaggcccacctgcgcgctcagcgtcttcaacgatgcgcgcgcatcgtccgccagaatggtcaggatttggcgatcgatatcatccataacgcctccgttaggtattttatttattatagctgcgagaaaaaggcagttaagcatatctgccttttttatgctatggaaagccgcccagcgaagccgcaagctatgtctctgggcaagcttcgaggaacgcagaatgaatgcagagataaaacgcggatcgctggagatggcggcggcgatgttgatttccggctccatcggctggtttgtgttgatgtccggccagccggttatcaacgtggtgttttggcgctgcgcggtaggcgcgctggtgctgctggcggtgtgcggcgtattggggcagctgcggcgcgatgcgctgacgcgcgccacgctgctgctggcgatcgccggcggcgtcgcgctggtgatcaactggctgctgctgttcgccgcctattcctatgcgtctatctccatcgccaccgcggtgtacaatacccagccgtttatgctggtggggctgggggcgctgtttctgggggaacggctgatcgcccgcaagctgctgtggctggggctggcgttcggcggcatgatgctggtggtgctggcgcagccgcggcaggcgggggagcagagtcattatctggcgggcatcgcgctggcgctcggcgcggcgtttttctacgccctgatggcgctggcggccaagcggctgaagggcacgccgccgcatcttattgcgctgatccaggtgacggtgggggcggtgatgctgttgccgctggtggatttccacgtttcggccagcgtggggcagtgggggatgctggcgacgctcggcgtgctgcacaccggcctgatgtacgtgttgatgtacggcgccctgcagaagctgcccaccaatctgatcggctcgctgtcgttcatctacccgatcgccgctatgctggtggatcgcctggcgtttggccaccggctgtctgtgtggcagctgctgggcgcggcgatcatcctgctggcggcggcgggcatgaacctgctgggcgagcggcgagcgcggctgctgccggcctcggacggccggcgcgccggctgatgctcagcgcggttttttcagccggcgccataaagtggtgcggctgatcccgagcaaccgggcggcagcggcgtggtcgcctccgcaccgcgccagggcttcgtgggcggagacgggcgccgccggcgtctcgggcggcggcgccaccgccagctccggcagcagccactgcagggtctcgccgctcggcgcgacgccggtgctcagcatcagcgccacccgctccatcatgttgcgcagctcgcgcaggttgccgggccaggcgtaatgactgagcgcggcgtaacagccggccagggcggtgcgcagcggctccgtcagcggcacgtcgagcgccgccagcgactgtttcagaaagtgttccgccagcatcgcaatatcgtcgccacgcgcccgcaacggcggcagctgcagccgcagggcgctcagacggtagaacagatcggcgcgaaaatcgccgtgttgaatcgcctgctccaggcgattgtgggtggcgctgataacgcgaaaatcgaccgccaccggctgttgcccgccgacccgcgtgatggttttctcttccagcgcccgcagcagccgggtttgcaggtgcagcggcatttcgccgatctcatccagaaacagggtgccgccgttggcggtttccaacagcccgcgtcggccgccgcgccgtgagccggtgaaggcgccttcctcatagccgaacagttccgcctccagcagcgattcggcgatggcgccgcagttgatggcgacgaacggcggcgtcgcgccgcgccgggaaaagtattcgcggtggatcgcctgcgccgccagctctttgccggtgccggtttcgccttcgatcaacaccgccgccggcgatcgggcgtacagcatgatggtgcgccgcgtctgctccatctgcggggaatcgccctgtaaatcgctcagcccatagcgcggctgcagggtattgcgcgcggcgtagtcaccgccacgtttggcgccgcccagcatcaggcgcgtcacgtccagcgcgtcgctgaaggcggcgcgcagggtggcggcggaatagagaaaaatggcggtgagcccggcctcttccgccagatcgctgatgaggccggcgccgaccacggcctgaatgccggcggctttcagctcggcgatctggccgcgcgcgtcctcttcggtgacgtagctgcgctgctccagcggcagatcgaaggtttgctggaactccagcagcgcgggcaggggcgttttgtaggtgatgacgccgattcgatcggcggttctgcgcgccttgcttagcgcctgcagcaggtcgaagccgccgggcttgaccaaaatgaccggcaccgacaggcggcttttcaggtaggcgccgttggagccggcggcgatgatggcgtcgcaaggctcggtcgccaggcgatcgcgaatatgctgcaccgcctcctcgaagccgagacggatcggggtgatggtcgccagatggtcgaactcgagactgatatcccggaacagatcgaacaggcgggtgatggagacggtccagatcaccggtttgtcaggcgtgcgggacggcgtgatgtgatcgctcatggtaggttaccgaatgaaagtggctgcattaggtgtagccttgtttcattcatgtttcaaacatgccgagtgaaaccgcgattgaaacgttaactgaaacgttttttatcgcttggtctgcccaatggcgacgcgaattttataactcacttatttttatcgcttttaattttttccccgccaaagtgcaacctggcccgccccttgctctgtctgttccatctagctaatcggagagaacgtcatgacgctgcgctcacccgggctcgcctttcgtcaggccctgagtaaagagaaacccctgcaaatcgccggcgcgatcaacgccaaccatgccctgctggcccagcgggcggggttccaggccatctatctttccggcggcggcgtggcggccggttcgctggggctgccggacctgggcatttcgacgctggacgatgtgttgaccgatattcgccgcatcaccgacgtctgcccgctgccgctgctggtggatgtcgacagcggtttcggcgcatcggcgttcaacgtcgcccgcacggtgcgcgcggtgagcaaggccggggcggcggcgctgcatatcgaagatcaggtcggcgccaagcgctgcggccatcggcccaataaggccatcgtttccaccgaagagatggtggatcgcatcaaggcggcggtggatgcgcgcagcgatccggacttcgtgatcatggcgcgcaccgacgcgctggcggtggaggggctggaggcggccatcgagcgcgctcaggcttacgtggcggccggggccgacatgctgttcccggaggcgatcaccgagctgggcatgtaccgccgcttcgctgaagcgacgcaggtgccgatcctcgccaacatcaccgaattcggcgcgacgccgctgttcaccaccgacgagctgcgcagcgcccgggtggatatggcgctgtatccgctgtcggccttccgggcgatgaaccgggcggcggagcgggtgtaccgcgccctgcgcgaggagggcacgcagaaaagcgtcatcgacaccatgcagacccgcaacgagctgtacgaaagcatcaactactatttgttcgaagagaaactcgacgctttgttcgctcgccagcgcgacgaataagcgccattcacgcagaagccaaatgaggacagtatgagccaagcgatccccccgcaaagcccgactggcgttaagccgaaaaaatccgtggcgttatccggcgtgcccgccgggaataccgcgctgtgttccgtaggacgcagcggcaacgatctgcactaccgcggttacgacattctcgacctcgcgcgccactgcgagtttgaagaggtcgcccatctgcttatccacggcaagttgcccaaccgcgacgaacttcatgcctacaagcagcggctcaaagcgctgcgcggcctgcccgccagcgtgcgcacggtgctggaggcgctgccggcggcatctcacccgatggacgtgatgcgcaccggcgtttcggccctcggctgcaccctgccggaaaaagaacagcacggcgcggccggcgcacgcgacatcgccgatcggctgctggcgtcgttgggatcgatgctgctctattggtatcactacagccacaacggcgagcgcattcagccggagaccgacgacgactccatcggcggccacttcctgcatctgctgcacggcgcagcgccttccgccagctgggagcaggccatgcatgcgtcactgatcctgtacgccgagcatgagttcaacgcctcgaccttcgccggccgggtgatcgccggcaccggatccgacgtctattcggcgatcgtcggcgccattggcgcgctgcgcgggccgaagcacggcggcgccaacgaggtgtcgctggagatccagcaacgctatgaaacgccggacgaagcggaagccgacattcgccgccgcatcgacaacaaagaggtggtgatcggcttcgggcacccggtgtacaccgtctccgatccgcgccatcaggtgatcaaagagatcgcgctgcgcctgtcgcaggaagcgggcgcgatgaagctgtatgacatcgccgaccggctggaaagcgtgatgcgcgacaccaaaaacatgttccccaacctcgactggttctcggcggtgtcttaccaccagctgggggtgcctaccgaaatgttcacgccgctgtttgtcatggcgcgggtgagcggctggtcggcgcacatcatcgagcaacggcaggacaacaaaatcattcgcccgtccgccaactataccgggccggaagcgcgggcgttcgtaccgctggatcagcgctgagcgccgatcgttatcgtgtcgttttcactatggagcctttggggatcatgatgcttgagtctgccaacaccggccgtccgccgttcgatcgcgagatggtcgatatcgtcgattatgtgatgaaagaggccgtcgataccccggcggcgtaccgcaccgcccactattgcctgctcgataccctcggctgcgggctggaggcgctgagctacccggcctgcaagaaactgatggggccggtggtgccgggcgccgaggtgctgaacggcagtcgggtgccgggcacccgtttccagctggatccggtgcaggcggcgttcaatatcggcgccatgatccgctggctcgatttcaacgatacctggctggcggcggagtggggccacccgtcggacaacctgggcgggatcctggcggtggccgattggctctctcgccaggcggtggcggcgggcaaagcaccgctgaccatgcggcaggtgctgatcgccatgattaaggcgcacgagatccagggctgcctggcgctggaaaacgccttcaaccgggtggggttggatcacgtgctgctggtgaaggtggcgtccaccgcggtggtggcgcagctgctcggcctgagccgcgaggcgatcctgaacgcggtgtcgctggcgtgggtggacgggcagtcgctgcgcacttatcgccatgcgccgaacgccggcacccgcaaatcctgggcggcgggggatgcgaccgcgcgcgcagtgcggctggcgctgatggccgccaccggcgagatgggctatccctcggcgctcacggcgccgacctgggggttctacgacgtctcgttcaacggcgaacctttccgcttccagcggccgtacggcgcgtatgtgatggagaatgtgctgtttaaaatttcgttcccggcggagttccatgcccagaccgccgtggaggcggccatgacgctgcaccgccagatgcaggccgccggcaaaaccgccgccgatatcgccagggtgagcatccgcacccacgaggcctgcctgcgcattatcgacaagcaagggccgctggataacccggcggatcgcgatcactgcattcagtatatggtggcgatcccgctgctgttcggccggctgacggcggccgattacgaggatcgggtggccgaggatccgcgcatcgacgcattgcgcggcaagatccactgccatgaagatcccgccttcacgcgcgattatcacgatccggaaaaacgctcgatcgccaatgcgctgacggtggagttcgccgacggcagccgtctggatgaggtggcggtggagtatcctatcggccatgcgcggcggcgcgaagagggcatcccgctgctgatcgagaagttcaaaaccaacctggcgcgccagttcccggccctgcagcagcagcgcattctcgaggtgtcgctggatcggcagcggctggcgcagatgccggtcaatgagtacctcgatttgtgggtgatctgacgcgagcggcgctgacaagccacgtcggcgtcgctatgatggaggctccatccccgtccgtcttcttatcaggtgattcatgattgatgccgcaacgctgttgttgttttccggcgcctgcgtggcgctggcgctgacccccggcccggatatgctgctgatcgcttcgcgcagcgtcagccaggggcggcgcgccggtttcgcttcgctggcgggcatccagctcggcacgtactgccacgcgctggcggcggcgctggggttgtcgcaactgttcgtcgccgtacccctggcttacgacgcggtgagaatgttgggcgcggcctatctgctctatctggcgtggaaaacgctgcgatccggcagcagtctgcaggcttccgccgggttgcaggcggtgccgacggcgcgcattttccgtcagggattgttcaccaacatcctcaacccgaagatggcgctgttcgtgctggcgctgttcccgcagtttatcgatccgcgcgccggctcggtggtggtgcagatgctggcgctggcgacggtgctgaatctggtcggcttgctgattaacggcggggtgatcctggcggtcagcggcatgaaaagccgttttgtcggccgtcgcttcagcgcccgctggccgaactatctgctgagcggcgtgttcgccgggctggcctgcaaactcattttcgacagccgtcgttaatcttcgcgcagcagcgcttcaaacgccgcgctggccggttcgtccggcagcgcgctgtacatcaccagccgcaggtggttctcttcgtcgacgatgaaagaggcgtggtcaaaggtgaccgggccgatctccgggagggtgaagctgcgccgcccctggcaacgtccgtgaatatcatgctgccgccagagctggcggaactgcggcgatacctgctccagcgcctgtacccgttggcgcatcacctcatcctccggcgcacgggcgtagtcgcggcggaagctggccaggatttgcggcgcctgcgcccgccactccagcaggcgcgcattgagctgcggatcggcaaacagcatccacaacatgttgcgctcttgcgccgggcgctcgccgatggcgaacagccgctgcgccgccggattccaggcgatgatgtcccaactgaggttcatgacgtaggccggccgcagcgtcaggtcgtccagcaggcgccgcaccaacggcgaaacctggcaccactgatggccgaccggcaccggcgggcgctgatgcgccaataaaaacaggtggtagcggccggcggcatcgagctgcagcacccgcgccagattttccaaaaacgtcaccgacgcattgatttccctgccttgctccagccaggtgtaccaggtgaggccgacgccggccagcgccgccacctcctcgcgccgcaagcccggcgtgcggcggcggctgccgctcggcaagccgactgcctccggcgacagttgttctcgcttttgccgcagaaaatcccccagttcgtggcgggtgcgttcgagggtgcgtgggggcatgtcggccgtcctgttgctgtcagtaatagtataaatggctatatagtaacagtttaaactctattccatactgcgaccatcataatctctggaggtggtatggaacattcattatctgttgaacggcgaggattgcccggcctgccggtgctgctgttgggcggtttcgtcacggtgttcgatctgtttgtggtcaacgtggcggcgccggtgatccagcaacagttcgccgccgatttcgccggggtcggtttgatcgtcgccggttatgaactggcgtttggggtgctgttgatcgccggtgggcgtctgggcgatcgcttcgggcgtcggcgtctgttcagcctcggcatgctgggattcacgctgagttccctgttgtgcggactggcgggatcgctcagcctgctgatcgccgcgcgtatcctgcagggggcggcggcggcgctgttgttcccgcaaatttacgccttgatgcgggtgctgtacgcgccgcaacagcggcggcgcgctttcgcctggctgggcatgacactggggttggcggcaatcttcggccagatcctcggcggatttatcattgaggccaacctgttcggcagcggctggcgcatgatctttttgatcaatttgcctatcggcgcgctggcgctgtgggcggcgcggcgcattcccgaatcgcgggtggcgcaggcgcagcggctggacggcgtcggcctgtggctggcggcggctggcctgtcgctgttgctgctgccgttgctggaaggcccggcgcgcggttggccgtggtggatcgcgccgatgttggcattggcgctgctgacgctgtggggcttcctgcgttgggaacgccgcctggcgcagcgcggtgatgatgcggtgctcgatccggcgctgttccgccaggcgggcttcgcgccgggtatggcggtggtgctggcgatttatgccaccgcttcctcgtttttcttgtgcttcgcgctgctgctgcaggcgggggcggggctgacgccttttcaggcgggcagcctgttcgccccggccagcgcggcctttatgctggcctcgatgctggcgccccggctgacgctgcgttggggcaacggcgtgctgagcgtgggcgtggcgatttacgccgccgggttggcgctattgatggcgcaggcgctgtggggggaggcgctggcgcatccgctgcggctgctgccggggttggtggtgttgggattcggccaggcgctgagcatgacgccgctgctgaatctggtgctgggtttggcgcaggagcggcaggcgggcatggcggcggggctggtggccaccgtgcagcaggtggggggcgcgctgggtatcgtggtcagcggcgtcggttttgtgccgctgttggcgagcggcggcgcggcggaacgctatgcccaggcctttgccggtgcgatgctctgtaatttggtggcgatgggcgtcgccctgatcttgttaaaccggatcactcgaaatactcagaaagcggatcttaagtaggccgccggcgggtgctttactgtcgtcatcatgagagcgcgataaggagccacactgatgtttcaacccgccgcatttcgcgaagacgatctggatgcccaactggcgttggtgcgcgcccacccgctggggctgttggtcagccacggcgagcagggattgacggccgatccgttgccgtttctggccgatgtcgaacaggggcagatccggctgcgggcgcacctgtcgcgcgccaacgagcactggcgacgtttgcaacaggcggcggaatgtctggtgatttttcagggccaggagggctatgtgtcgcccggctggtacccgagcaagcgccagaccggcaaggtggtgccgacctggaattacagcgtggtgcaactgcatggcgtgccgacggtgacggacgacccggcctggctgcgccgccaactgatcgatctcaccgcgcagcaggaagggcggcgtcctgaaccctggcggctcgaggatgcgccggccaactacatcgccgcacagcttaaaggcatcgtcggtattgagatcgccgtcacccggcgcgaaggcaaatggaaaatgagccaaaaccgcagcgccgaggatgccggcggggtgatcgccgggctgcgcgatggcgatgaagcgcagcggcgactggcggcggaggttgagcggcggcgcggatagggtatgctaaccgaagagtgggctgagggaaccttcggatggattacaccaaaattatcaaagaaataggccgcggcaaaaaccatgcgcgcgatctggatcgacagaccgcctttgagctgtatcaggcgatgctggccggggaggtccccgaacttgagctgggcggcattctgatcgcgctgcgcatcaagggcgaagccgaagaggagatgctggggttctaccaggcgatgcagcagcaggtattgtcgctgcaggcgccgcaggggaggccattgccggtggtgctgccgagctacaacggcgcgcgcaagcaggccaacctgacgccgctgctggcgctgctgctggcgaaagtgggcctgccggtggtggtgcacggcgtgctggacgacagcacccgcgtgaccagcgccgagattttccgcgcgcttgggctgccgtggtcggaacaggccgctcacgcccaacagcgtctcgataacggcgaggcggtattcatgccggtttccacgctgtcggcgccgctggcgcggcagctcgggttgcgttggcgcatgggggtgcgcaacagcgcccatacgctggccaagctggcgacgccgttcggcgaacaggatgcgctgcgcctcgccagcgtttcacacccggagtatgtcggccgggtggcgtcgtttttccgccagatcggcgcccgcgggctgctgatgcacggcacggaaggcgaagcttacgccaacccgctgcgctgcccgcaaattcaccacatcgtcggcggcgaacagcgcatattgctggagcgcaccttgccggatgaaacgccggcattgccggcggcgaaagacgcggaaaccaccgcgcgctggactgaacgctgtctggcgggcgaggtggcgataccgcaggccatccagcggcaggttgcctgttgcctggtggccgccggcgagagcgagacgctggagcaggggctgaaacgcctgcatcaggcctgagcgcgactatactgggatatttcctcatcggctgagaaggacggttatgcaacaggctctcgattacttcaatcaattgaaccaggattacctcgacgtacaccgcgccaaagaagagctgttctggcaaaactacatgggcaccggcggtgaagacgtctcggcgcgcttttccgccgcggaaagcgcctataagcgctttatcgccgaaccgcgccggctggcggagatccgcactctgctggccggattggaagcgttgccgcaggaggcgcagcgcgatgcgctgatccacggtctgcaaggttggctgcgctttttcgactgcaacgccatcgaagatccgcaggcgcaggcgctgttggatcagatcatccacgccgaatccgatctctactcgcgccgcaagggctatcaggtcacccatctgaacgccgacggccagcgcgtggcggcttcgctcggcgagctgttgaccaaccaggcgaccaacccgaacgaagactaccgccgcagctcgcagcaggcgctgcgcgatctggagcaatggctgctgcataacggcctgccggagctgatcggcctgcgcaaccgctttgcgcgccagatgggctatcgcaactatttcgactacaaggtgaacaaaaccgagcgcatgacgccggagcagctgttcgccattctggatcgcttcgagcgggaaacccgcgaggccaacgcgcgcagcctgcagcagctggcggccgacaagggcgaccaggcgctggagccatggaacgtgcgcttcgccagcgccggcgacgtcacccgccaactggatccttatttcccgttttcccgttcgctggaacgctgggtcgacagcttcaaacgcctgcacatcggttttggcggcgcggagatgaacctcgatctgctggtgcgtaaaggcaagtatgagaacggcttcatgcacggcccggtgccgccgtttgtgcgccagggggaatgggtgccggcgcgcatcaacttcaccagcctggcgcagccggggcaggtgggcagcggcgcttacgggctcaacaccctgttccacgagggcggccacgcggcgcacttcgccaatattcgccagaatgcgccgtgcttctcgcaggagttcccgccgacctcgatggcctatgccgaaacccagtcgatgttctgcgatagcctgctggacgatgccgactggttgaagcgctatgcgaaaaacgccgccggcgaagcggtgcccgatgcgctgattgaggccggcatcgcggcgcgccagccgatgcgcgcgttcaacgaacgccatatcctgctggtgccgtacttcgagtgggcgttgtatcagtgggatgacgagcagcgcacgccggaagccatcaccgcgctggcgcgcgaggtcgagcagaagatcctcggcatcagcggcagcccgcgcccgacgctggcgatccctcatctgctgtcgctggagtccgcctgttcttatcagggctacctgctggcgatgatggcggtggagcaaacccgtcatttcttcctgcagcgcgacggttacctgacggacaacccggccatcggcccggatctggcgcaacactactggttgccgggcaacagcgtcagccatgacgacacgctgcgcagcctgaccggcgaagggtttaatccggactatctggcgcaggcctgcaaccagacggtggcgcaggcgtggcatgaggcgcagcagacgatggccgccgccgccgcccgcccgcagccgccggcggatttcgatttgcaggcgcatattcgggtggtggatggcgagacggtattggcagacaatgccgacggtgacgaacggatgtgccgcgacttcgctgcggcgatagaggcgcgtttggtttaaggctgacaataaaatccacgcggaagcgtggattttatttaatggttaaaaccaggcgtgattttattcgaaatagacgtcgggattatcggccagagacacgaagctcttggtgtttctatccagcgtgcgaatttcgccgctttcgatgtcgtacacccagccgtgcaggcgcagcccgctgttgcgcagacccaccgccacagaaggatgggttttgatattatttagctgagcaataacgttctcttccaccatagcgttaactttgtctgtttcgctattccaggttttcttctcgaccaccgcttttgccgcatcggcatagtgcagccagtgagctaccgcaggcatagggtcgaggcactggcaagacgcgatagccttcatggcgccgcagttcgagtggccacaaatcacgatatcggtaactcccaacgccaccactgcatactcgatggtcgcagaaaccccgcccggctccgggccgaaggaagggacgatgttgccggcgttacggataacgaaaagctgcccaggttcttgctgtgtgaccagctcaggcactaaacggctgtcagagcatgagataaacagcgctttgggattttggctggaggcaaggctgcggaacagttccttgcgctgcgggaaaatctctttctggaaactgaggaaaccttcaatgatatgttgcatacaacgctctctgcatctgtagtctgcgtaacatgataatcatcctctcccgttagtccagccatgggcaggtaaaaaaatgtgtgtgcaagccccccgcaaaccccattgaatacagggtttctgcctgtttgcgacagaattttccggcttgttggcgcgtggattgctgacaaagcggacggcaagaaattcgctgttgtgcccattcagcgctgacgtacgcgaacataaaaaaagcccgccggggtgatagccggcgggctttttgacgtctggggcggcgattatttgtagataaccgcggtggcgtgcatcaggttattgccgctggtggaggtgatggtgaaagccttggcgcccgccgcatcggctttggcggccagctgagacttcaggctgctcaggtcggttgcgccgctggcgacgatcacgccggctttttcgaattgggcggcatcctgcgcgctgacgtgttcagcggcgaaagtggtgaaagaaacggtagccagggcgatagcggcagcaaaagttttgatggttttcatgttggtcattcctgtcaaagtgaattagggagaaaggggtttgcctttcgatgggaggattattgcgcagtgacaggcgggatgaaatcggagagtgttgacagttttgttcagattttttgattattaattcccccgttcatcttctgcataaacaggggggagacgatcagcgcgtcgggcgcgccagatcgaaacggtgctgttcggaaatgccatagtaggcggttgggccgccggcgcgcaggataggttcggcagcggcggtctggtagacgccgtgttcgtccagcagcgccggatcgaggtgcaccgccaccacttcgcccaatatcagccaggtctccacctgttcgccggcggcggtttgcagctgaatgcactgggtaaggcggcattcgaagttcaccgggctttcggccacgcgctcggctttgacccggcgtccgggcagcggcgtgacgccggcgaaggcgaattcatcttcgccgcgcggcaggttgattgcactgtggttcatcgcttccgccagcgggcgtgtcgccaggttccagacgaactcaccggtttccacgatattcgccacgctgtctttccaaccggtgctggcgaaaccgatgatcggcgggcgatagttgaagcagttgaaaaagctgtagggcgccagattacgcaagccggcggcgctgcgggaagagatccagccgatggggcgcgggccgacgatggcgttcagcggatcgtgcggcaggccgtggccggcggcgggttcataataataacgagattcacggttcatgggagaccctgcggcaatcgatgaagctttcattgtgccgggtttcccgccgctgcgccattgcgggccggatgtgttatcttacgcgccggaaatcccttcaagagagcccgtcacggtggaaaaaaagaaaaccttcccgcagcagaaaagcggcctgcatccgcgcaaccgtcatcgttcgcgctacgacttcccggcgctgatcgccagttgcccggcgctggcgccgttcgtaaaaccgaacgcctggggcgatgtctcggtggacttcgccgatccggcggcggtgaaaatgctcaaccgtgcgttgctgcaacacttttacggcatcgaacactgggatattccggctgattatctgtgcccgccgatccccggccgcgccgactatctgcatcacctggcggatctgctggcgaccagcaacggcggcgagatcccgcgtggcaagggcgtggcgatcctcgacgtcggcgtcggcgccaactgcatttacccgatcgtcggcctgcgcgaatacggttggcgtttcaccggctccgaaatcgatccggtgtcgctcaactcggccaagatgatcgtcgagatgaacccgacgctgcgcaacagcgtgcgcctgcggctgcaaaaacagcctgagctgattttcagcggcattatcggcgcggccgagaaattcgacgccaccctgtgcaacccgccgttccacgcgtccgagcaggaagcgcgcgccagcacccggcgcaagctgcataaactgggcaaaggggaagtggccgacaagccggtgcaaaacttcggcggcaagaacaacgagctgtggtgcgaaggcggcgaagaagcctttgtgcgcaagatggtggcagagagcgtcggcaaggccaacaactgcctgtggttcacctcgctcatctcgaaaaacaccacgttgccggccatctaccatgcgttgaaagtggcgggggcggccgaggggcgcaccatcgagatggcgcaagggcagaagatcagccgcttcgtcgcctggaccttccataacgccgagcaacaggccgcctgggcagccgaacgctggcgctaatctccccggcgccggttatcctgccggcgccgacaaaaatccgcattttacctttcaattttcatcacttacgttattctcattacgcatttaataataaaaatcttaggttgttggtttatttaaattcgaataattactttactgaataaataaatttaatccggttaatagcaataaccagaaggttcggcgctgcccgttccttccgcgatggcacgtctgcgtgtgggcgcggcatgtggccagacaaaataagaaaagcgccatcatctgccacaaggactacaccttatgctgttacgattcagtcagttaactacccacaaaggcgccgagctgggcgcgatagaacacgccgttcccatgatcgtattctcgcccgacggcacggtcttgcgcgccaacgatctcttcctcaacacgctgggatttcaacgcgatgacgtgattggccggcatcaccgtattttctgcgatccgaactatgtcgccagcccgttgtaccgcaagcattgggagacgctgaataaggggcaacccatcacggacaccctaaaacgcatcgcgaaaaacggcgagacggtatggctgcagggcacctacgcgccggtgctgaataaacagggtaaggtggtggaaatcgtcaagatcgccagcgaagtgaccgagcgagtgacccaggcgcaggaacaccgcagcctgctggcggcgctgaatcgatcgatggcgatgatttctttcacgccgcagggcaccattgtcagcgccaacgacaatatgctggcgctgatgggctatcggctggatgaggcgtgcgggcagtcgcatgcggtgctgtgcccgccggcgttcgccgcttccgacgactatcggcggcactggcagcgcctggcgcgcggcgagttcatcaccgggcgttttgagcgcgtcaaccggcgcggcgaacgggtatggctggaggccagttacaacccgatcctcgacaatgaaggccaggtggtgaaagtggtgaaaattgcccaggacatcacccgattgatgcaacagcagcagcacgaagaagagatggtgcgcaacgcgcatcatctgtcgctggatactgaccggcaggcggcgcagggcgcggtcatcgtgcagcaggcggtgaagggcatgcagcaggtcgaagcggcggcgcgcgaaacctcggacgtggtcaccgagctcggcaagtgctctcagcagatcggcaccattgtcgaagccattcgtaaaatcgcctcccaaaccaacctgctggcgattaacgcctccatcgaagctgcccacgccggtgagcacgggcgcggttttgcggtggtggccaacgaggtgcgcacgctggcggaacagtcgcgcaaggcggcgaccgagatcgaacgcatgaccaagtctatccagcaaggcgtggcggcggcgatcgccggcatggcgacctgcgtggaacaggccggcggcggtgtggcattgacccatgacgccggagaagtgatcaaccaggtcaatatcggcatgcatgacgtcgtgaagctgatgcaggcctttacctcggtgaagcagggcgatgcgctgcactgagtctgccggacgccgcctctgaaaacgaggcggcgtttgccttcccccaccgatgcctgcgccgttgagctgcggttcaattttaccggtctatgctagacttgatgtgaacgaacgttcgttcattaatatcaatttatggcgccaggcgcccccttcaccgtttcgggaactgacgatgggaaaccgagaaaagattgtcgaggccgcgctgcacagctttacccatcagggatttcaccagaccagcatgcgggatatcgcgcaggcggcgggcgtcagcgtgggcaacctctataaccatttttccggcaaggaggcgctgatcggcgagatcgcgctgctggaaaacggcgtattcgccgagttcgccgccggattattggccgacagaaagcggccgaaacaggcgctgtcgatttttttcaccgcctatcatgcctttgtcgccgaaccggccaatgttcagctgtcggcggagatcgtggcggaggtggcgcgcaacccggcgttggccgagccgttcagcgccaaccagcggcagctgattgaggcgctggcgacggtgatcgccgaggctcagcaaaccggtgaaattgcggcggcgatagcgccgttaccgctcgcgcagctggtgctggacgtgatcgaaagccaggcctggcggcaggcgatctttgcgtcgcctgcaccggaggagaccacgccggtgcggctgttggaacaactgctctaccggcatccctagtcgaggtggatatgctgcacattgagccttatcgcgacgctgaccgcctgcaaacggcggcgctgatctacgccgcgttctgcgacaagttccagcgcgcgcgccgtttgagcgcccgccggcagtggcgtctgttttatcggctgtggagttggcagcaaagcggcagccgggagcgtagcttcgtagtgaaacaggatgagcaggtggtggcggcttttgccctcaatgcggccgaggcagagggcgacggcgggctgcgcccgcgcgccttgcctatttggcggctatgccgccgctacggttggctgaacgtttggcgcatgtatctgcaaattgtggtattgcagcatactccggcggccgatgagctgtatctttcctacctggcggtggcggaaaaccagcgcggcaaagggatgggcaggcggctgttgcagtggatgaacgactacgccgccgaacagggcgcaggccggcgcctgagcctgcacgtcagccggcgcaacgtcgatgcgcagcgcctgtaccggcgctgcggttttctggtacggcgcgaagagcactacgccttgctgggggtgctgttcggccaggccgattgggtattgatggagaaacgcaacggggaggcgatgtgcgcaaaatagggctgtgcctcgtggcgctggttttggcggcgcttggctgggtgatttacgtcaacgactttcgctttgtcaccgaaccggtcacggtgaccgccggcggcaaccggctgagcggcacgctggtgctgccggagcatgcgccggtcaaacccggcgtggtggtgttcatacacggcgatgggccggccaacgccagccgcgacgaaggctattacggcatttgggaggcgatagcgcagcagggctatgcggttttatccttcgacaagccgggcgtaggcggttccagcggcaactggctgcatcagaccatggcggatcgcgcgcgggaaaccgctgatatcatcgactgggccagacgggacgggcgcttcgatgcgcgctgcgtggggctgtggggcgctagccaggcgggatgggtgatgccggaggtggcgcgtttacggcctgacattgctttcactcttgcactctcgccggcgatcaactggctgcggcaagggcgctataacacccgggcggcgatggcggcggcaggggacgatgaagcgcagatcctggcgcgcgaggcgcattggcgccatatccagaccctgctcgagcaaccggacggctacgcgcagtaccgtcgcgagtctggcgccgccgcattgagcgccgaccgctggcgttttatccgcgccaacatggccagcgacgcgacggcgggattgcggcatttcgccacgccggtgcacctgatcctgggcgggcgcgacgtcaacgtggacgcggacgaaaccgagcgcgtgtatcggcaaacgatcccggcctcgctgctgacggtgacgcgtatcgccgaagcagaccacgtgatgatcaaaccgctgttcgcccgccatccgtggctgatcaacgtggttggcctgtttgctccgcgctcggtgcaatacgacacctaccggcgggacgtggcggccttcctggccgcccatccttgcggccaggggcgttagcctcagctcgcggcaggcggcggctcttcatgcggctgcggcgcgcgggagatctgcatcgcctgctgcggcatgccgatgccggcccgatcgaaatggattttcaccagccgatcgagggcgtattgcaccacccactgtttcagcgcctgtgtgcgcaccgtcacgcgggtggtgaacgagcggtctcccagcgccaccacgccgttgaagaccggctcgccaatcaggaaatgcttcacctgttcatcttgcttcagcgccgcgacggcctgatgcagcacctcattgacccgatcgatgtcctcgtcgcggctgacggtgtagttggcgcggtataccccgaactcacgcgcatagttggccagcgtggtgatcgaggagtacggcacgatgtggtagacgccgtagtcgtcgcgcaggccgatcgagcggatggtcatgcgctccacggtgccggtgatgccgctgacggtgacgtactcgccggtgttcatgccgttttcgaactggatgaacacgccggtaatcacgtctttcaccagcgtttgggcgccgaagctgatggccagccccagcgcgccggcgcccgccagcagcggcgcgatgttcaatcccacctgcgacagcacgatcatcacggtaatggtgctgataacgatagccagcacgttgcgaaacagcgtcagcagcgtgcgttcgcgcgcgctcggccgtacgccgttgctcagctccagcgccagacggtgctcgatgatgctggccatcagcgtccagctgaatacggcaatcaacaggatcagcaggatatgcaccagcccgccgagcgtccgctggccattttcgctgcccgcccactggtacaggttgatcaggtgccaggcatcgagcaggaacagcgtcaccgccagcaccaccatcacccgcagtatcttcagcccgttggggatgtaggagttgatgcgccgctcgagcatcgggtagcgcagattgacgtcggtcggcagtgaaatgcggcggaaaatccagcgggtcagcatgccggacagcagcgcgccgacgccgaccaccaacaggcttttcaccgtggcgctcatcataaagcgcaggctgttgccgatgtcgaactgggacagcacgaacaacaccagaaaataggcgatcgccaacagatgccagatatgccccagcccgcgcaggatcacgctgaaaaacgccatcgaccgctcggccagcaggttgatctgttgctgtatcggcttgcggttgtgcaggatcagccaaatggcgtacagcgtcagcgccagcatcaccaccaggttgacggtggcggcggccgggtagcttatctggaccgccaccaccggcaccaccaccatcaggccgtagccgatcaggccgctgagccaggcgaggcgcgtgttccagtagtgcgcgctccggtcgctgaaggggaaggggcgcagatagtcgaagcggggggcgaaaatcagccgcagcaccgccttgaaaaattcaatcaccgcgaaggcgctgagaaacagggtctgcagccgcagaatggtggcgctgtcggcgtggacgtggcgggcgaacagattgcccgccgccagcgccagcagcagcaccagcagatcgatggcgaaagcgccgagaatggcggcggggcgtttataccacgggccgcgctgtagccgcgcattgtgtccccaactgcccatgcgtttgtacagcggcgcgatcagccgccggatcaggtggaacagcgcaaaggtgaccgccaccgtcagcagaaagtagcccagcgcgcggaaaaagccggcgggattgaaaacgcgcttcgggccggagtcgatcagcttttgcagcgcgccgagcttttggttaaaggtgccgatgccttcctgcgccagcgagttcaggctgtcgctcagcgtagcgggcgtcgattcctccggcgttgccggcgcggcggcgggggcgtcgccggcggtctgtttcaggtggttgatgagttccgcgcgcgctttgtcgtcttgcagcagctcagccagcgcggcgtaggcggctttctgctgctcgctcttgtcggcgggcgcgggcggcgcattttgcgccagggccggtggtgcgaagacgttcagggtcagcaacagcagcaggaaaagcaggtgttctcgcagatgagaacctcgtcgggagtctgcgtttggcggcatggttcctctctttggcgttctgtgatcggcggatgtaaaagcaatacgatgaaaaacaatgaatatagtaggaaaggtggcgcgacggggcgtgggagagcgtgcggaatgaaagcggcgggcgcgtggggcgcccgccgttaaaccgccaggatcaggacacgtgctgcaggaactcctgcagacgcgggcttggcggatgattgatcagatcgtgcgggttgccgtcttcggcaatccggcccttgtcgataaagatcaggcgcgacgcaactttttcggcaaagccgacttcatgggtaacgatgaccatcgtcatgccttcctcggccagatcctgcatcaccttcagcacttcatggcgcagctccggatcgagcgcggaggtcggctcgtcgaacagcatcattttcggcttcaccgccagcgcgcgcgcgatcgccacgcgctgctgctggccgcccgacagttcggacgggtaatggtgggcgcgctccgccagaccgaccttggccagcagttcgcgcgccagcttttccgcatcggacttcttcgcgccgcgcacgcggatcgggccgaaggcgacgttttccagcgccgtcaggtgcgggaacagatagaactgctggaacaccatgccggcttcctggcggatcagccgatcgtccactttcggatcgttggctttcaggccgtcgacgatcagatcgccgctggtgacttcttccagcttgttgatgcagcgcagcagggtggatttgccggagccggacggcccgatgatcaccaccacttcgcctttgtcgatcttcaaatcgatgttgtgcagcacctgggtttggccaaaatgcttggagacgtttttaaattcaatcacaggattttcatccttctttccagacgacgcagcacgaagctcagcaccagggtaataatcagatagataaccgccacggcgctccagatttccagcgcgcggaagttaccggcaataatttcctgaccctgacgggtcagctccgccacgccgatcacgatgaacagcgaggtgtctttgatgctgatgatccactggttgcccagcggcggcagcatgcggcgcagcgccagcggcataatgacgtagcggatggtttcgcggcgcgacaggccgagcgccaggccggcctcgcggaaaccgttatggatagacagcaccgcgccgcgggtgatttccgcgatgtaggcgccggagttgatcatgatggtcaccaccgccgcggtgaaaggatcgatgcgcaaatcggtgaacgccatcggcaaggcgaagtagatgaacatcacctgcaccacgatcggcgtgccgcggatcacttcgataaacaccaacgcgatgtggttggcgatccaaccgccgtaggtgcgggcaaagccggcgacgaggccgatgatcaggccgccaatcagaccgaggaccgaaatccacagggtcattttggcgccctctaacaagataggaatggcgggccagatggcgctccagtcgaactgcatgatatttctcccggtgatcccaaacgtgggtatcagatacaacaaagcgcagggggttaagcgccccctgtgcttaagttaatcgcttgccaaattcacagcttacttaggttcggtgccgaaccacttcttgtaaatctcgttataggtgccgttctcgcgcagcgttttcaacgcgccgttcaccttctcgcgcagctcgtcgctgcctttagggaaggcgatgccatactgctgcgcttccagcgaatcgccgacggttttgaacttgccggcgccggccgtcttaatgaagtataggatgtttggcgtgtcgtgcagcaccgcgtcggcgcgcttggtgcccagttccatgtaggcgttgtcgatgttagggaactgacgcagatccttggttttgatgtgctgcttggcgtaatccaccgagccggtgccgctcttcaccgccaccactttgccgttcagatcgtcgatgcttttcacgctgttgttgtcggcgttgaccatcaccagcaggccgctcttgtagtagccgtcggagaaatcgatggctttcttgcgctcatcggtgatggtgatgccggccagcgccagatcgacgtttttggtctgcagcgccggaatgatgccgccgaagtccattggtttcagggtgtagtccagcttcagctctttggcgacggcggcccacaggtcgatgtcgaagccgacgtatttgtcgccttgcttgaactcaaaaggaacgaaagcggtgtcggtggcgaccaccagtttgtctgctgcgtgggaacttacggcaaaggccagggagagtgcggccagggagactttaaaaatcgacttcatgagaggaattcctgtacaggttgcggattacccattttttatattgcagttggtgccatgaaaaaatcgtgccatgttttcaactaatataaaaacaaagagttactgcgtgatgttgtgccgtgacggcgaatagttatggttatgcaccacaatgaggcaccgaaatggtgcgtaagaattatcttggtgcacggggctatcattaaccaaattttggctgtgaaacaaccgttctttaacgtttttgcttcaatattgataactaactctaactttcatgatccattgacggtgcaagggtgactgcgagaggggcaaaaagggagcagataatgctaacgcaactggctgtctttgctgccgcgccggttgtacaggctggtggccgcgtgttttttgtcttgttcggcctgacaggcgacgcaaaaacgcacgcccttcagcgccttgcggcgcgcctcggggatcggttctccgcattcctggcaatagcgttcgctctcgccgtgcccgagcgcttcacgcgcgcgctgcaccgcatcgtcgacggtggaatcaatctgatcttgtacggcgccgtccgccgcccagccgctggccatcatcacctcctgacaaggaaaccctaccgtttaatatgggccgttttttgtacaatgcaacggtcgcgcaaaagaaaacaggccgggcaaagcccagcctgcgctgcccggaacgacgggcgatctgcaacgctttcgcgttattcgatattggattcgatgaaccacaggaatttgtccagatcgcgcgaggcggcggtgaacatatcggcggtgtcttcgtcttccacttcggtaatggctttgcggatgtcattcgcgaccgcgccgtagcgatcggccagcgctttcaggtgctcttgcacgctgtggatattggtcgggtagcttttcagcggcgtgcgatcgttgaccacctgtacggtgcccagcgccacgcctcccagctgcaccacgcgctcggcgaaggtgtcctgatgctcgatgatggcggtgcggaagccgtccagcatttcatgcaccgcgatgaagttcgcgccgcgcatgttccagtgcgcctgtttggtgatcaacgaaagatcgatgaattgcacgacctgatggttcagcgccttgatggcggccagtttaactttttcgtccagatcgttacgggtatacagcagatcagaagatttcgttttcaccagtttagcggtactcatatcagatatcctcttgattagtcgttgtcctatttcgttacgggattaattatagcagggatgtttatttttgccgcacgaaaatggctattgcacaaataggggtggcctaatgacaatatttttatttggtttttgtctattgtgtaattttatgaattttattgttattttgttttttattattatttttgtcagtgacaatttatccccgttatcttattttctgcgggcgcgcaggtttggttaaatatccactttgttatcgtggtgttaatgccaagcctattcagattgatagacgtaattgatacggctaaagtatggaaattatccccagtctttattggcgagtgatgaaaattaacgtcgtcggcaccagcggcagcggtaaaagcaccctggcgcgtcaactggcggaacgtcttgacgttccctatatcgagatggacagactctattggcggcccgagtggcaggggacgcccgatggcgcgtttctggcgcggcttgagcagacgctggccgaagcgggaggaggctgggtgctggacggcaactacagccgcacgcaaccgatcaagtggcgcgaggtcgattatatcctgtggctggactacggtttctgccgcacgctgtggcaggccgcgcgccgcgcgtaccgccgcgcggccagcaaaagcgagctgtggccgggcaccggcaatcgggaaagtttccgccgttctttctttagccgcgagtcgatcgtgctgtggacgatccgcacttactcgaagaaccggcgaaaatacctggcggagatggcccgtaccgatatagggggccgtttcaagcgcttgcgctctccccgccaggccgccgattttctacggacgctgccgcaggctcacagcagcaggcggtgatggatcctcaccaccgctttcttgatgtgctgcggccgctgccacaggcagccggtcttatgcggttccatctggaaaaagatcgcgaacatgccgtgcgtcatgtgaagggtttgcgggtggcgtttgatgtccagcagcagcagatcgctattttctgcatgcggatgttcgcgatgcccgtcgcccgccaggccgtattcgatgcgttcttcgccgctgatcagcagatgcagcgcgatgtactcctgatgcatttcggcgcgcttctccgccgccggcgcggtggtcagcgtcatcacgtccataaagatgttgtcgccgtcgatcgggtgatggcccagcgccagttcgggcaggtcacatcggcgcaactcggtcagggttgaaaccagcgccggcgcgagtccgcggccgaagcgtgggttgaacaggctgttgtgaatcactgttattctccatgtgagcgaaagtccaaagagcctgcgatacaggctaaggggaagtatgccgatttgtcacgaggaaaacagttaacccgcctgcattccggcgttgcggacggcaggcgagtcaggcgatcaagaaaggctttcgaggcgcggtttggggcgaatggtcagggcggaacccatggaggcggcgataatcgccgccagcgccaaccattgcacgccgctcaggtgttcgccgaggaacagcatgccggacagcgccgccatcgccggctccaggctcattaaggtgccgaaagtgcgcgccggaattttgggcagcgcgatgatctccagcgaataaggcagcgcggtggagaggatcgccaccgccagcgccaccggcagaatatcgaggttgaacagcacgctgccggtttgccaggcgccgatcgggcagaacaccagcgcagcgatcaacgaaccgagcgccaccgtgccggggccgtgatcgccgccggccttttggccgaaaatgatatagaccgcccagcaggcgccggcgccgagcgcacaggcggcgccgaacggatcgatcccgcctacgccgtggccgagcggcaacaggaaccacaacccggcgatcgccagcgccacccagagaaagtcgatcggccgccgcgacgagaacatggccaccgccaacgggccggtaaactccagcgccacggcgatgccgagcggcacggtgcgcagcgaaaggtagaacaggtagttcatcgcgccgagcgacaggccgtaaatcagcagtggcaagcggctgccggcgacgatgcgcatacgccacgggcggaagataatgaacagaatcagggtgccgatgaaaagacgcagcgtcgtaatgccttccgcgcccacgatcgggaacaggcttttggccaacgaggcaccgctttggatagacaccatggcgatgattaacagacagatgggcagcagcgcggagggcgctctgccggaagtagataacgacatccttaacgggccttttttgcgccgttcctcagccttgagaaaacggtcgaaacggggatgcgagcagtgtaaatgaaatggcgaaaatctgtctgagaaaagcgcgcatcgcggtgaaatccgccgatcctcggatgagatgtggcggatttggtcaaaaagtgcgctttttcttaagaattatctggatattaaattggtgatttttgtcacagaaagccgtagaatacggccgaaaatagagcgaaaagaagcagatacactgttcttgaaatcttctgttacacgatataaagcattagacactcatttcaaggcagagtttcacgctaatttttgttatattttcaaagcatgaacaaatggatgtacttaataataaaacgcgtttgaggtggttatgaaaaaaattgcatgtctttccgcagtagcagcttgcgtattagcagttagcgcaggtaccgcattcgctggtcagagcaccgtatccgctggctatgcgcagggtgatctccaaggcgttgctaacaaggccaacggtttcaacctgaaataccgttacgagttcgacaacaacccactgggtgtgatcggctccttcacccacctggaaaaaaatcgttctgaaagcggtttctacaagaaatctcagtacgattccatcaccgcaggtccagcttaccgcttcaacgactgggcgagcatctacggtgtgatcggtgttggctacggcaaaaacatcgacaacgcccaggctggcggtaacaaaggtggcaacagcgactacggcttcacctacggtgcaggtctgcagttcaacccaatcgaaaacgttgccctggacgttggctacgagcagagccgcatccgcagcgtggacgttggcagctggaacgttggcgtaggctaccgcttctaagatttcttcatgcctgcgggcgtgaatgcgcggcacaggttgccgcgcggataaaaaatccgccttcgggcggattttttttatctgtcattagccgctgcgccccgtcggctgcgtcgaaaagcgcgcgctgcgggcatcgcgctcatagccttgcggttcggtcagtaaaccgtacagctcggggcggcgtccgtaaatccagcggcgtccggtactgagcgggatcagcgtcagatcgagatcggcactgaccagccggtcttccgccgcccaggtctccgctacgatgcggccgtagggatcgaggatcatcgcattgccggtgcgtacctcatcgtcatcgcggcccacgccgttgctgaataacaaaaacagcccgttgtcatgagcgcgcgagggcagccagcgcatcagccagccgcggccgtgttcgccgcgaaaggcggcttctatcgcctgcggatcttccgctcgccgctgccacagcgcctgtgggatcggcttcatgccgtgcgggctgcgcgaatgggtgccgccggtctggtgcggggccatcaacacctccgcgcccagcagcgccgtcgcgcgcacattctccaccagattgttgtcccaacagatcaatacgcccacgcgcacgccccagggagtgtcgaacaccgtatagcgatcgccgctggcgatagccgggtgttcgaaggcgtgcagtttacggtgcacatgcagcgcgccgtccggcaggcatacggcgtaggcgttgtagcaacggccgtcgtcgcccagttcgatcagcccgacgccgatcgccatattgtaacgctcagccagcgggcgaatgcgcgccagcgaagggctggacgcgatcggttccgccagcgcccgcacttcggcggcggacagatggcgcacgtgccaatagccggtgatacacatttccgggaaggccagcagctgtacctgctgctcggccgcctgagcgataaagcgctcgatagtcgacaggttgtaattcttatcgttggcgcgatgctggaattgcaccgtggcggcgcgtaatgagatggtcatggtgtctctccgattagggtctgcgttgattacagcaggtggtttgattactgtataatcaattaaattccctattcgataacctaatggaatggatataaaacaactgcgcgccctggtggcgctggctgaacagggcaactatcggcaggcggcgagccggctatgcatcagccaaccggcgctgagcaagcaaattcaggcgctggaaacccagctcggcgttcgagtgttcgagcgtggccgacagggggcggtgctcaccgccggcgggcagcggctctacccggaagcgcaggcgctggtggagcagtaccagcagtttcagcggcgcgcgcggcgggtggcgctcggggaagcggggcggctggcgctggggtttggcctttccagctttcatctggcgccgcagctggtggcagcctttcgccaacggtttcccgaggtggcgatcggcctggaggacttgccgtcggaacgccagtatcagctgttgctgcagggagagttgcaggcggggttcgtgcgcttgccggtcaatacgccgctgtgcggcgtggcattgctgagcgatcggttggtgctggccgcgccgggcgcgctggcgctgcgcgccgacgatctgatggcgcgtttcaatcagctgccgctgttgcagttgactcccaaacgcgggcgcgggctcagcgatcagtcgctgcggtttatcgccgcccaccggttgacgccgaacgtggtgcagcaggccggcgatatccagacgttgctggcgctggttgccgccggcgtcggtgtcgcgctgctgccgcacagcatcacgcatatcgcgccggccggcatcgacattttaccgctgagcggcgaggagacggagtggcagggcggtatcgcctgggatccgcagcgcgccgatgcgctgcgggacaacttcattcagacggcgttggcggcgcaacgcacttaggcattcaaagcgggcaatgcatcaccacgatcgggctctggtgatactcgctgcggtggctttcgctaaagccgacttttttcgccagcgccagcgaagcctggttttccggtgagatgatgcagacggtttgcttgccaggcaggtgcgttttaccccaggccagcgccgcccgcagcgcctcggtggcgtagcctttgccgtgcgccgagctcaccagcgtccagcccatttccggcgcgtcgagcgccggggtgatgtcgcgcaggaagttggagaagccgatgctgccgagatactcgccgctctgtttgtcacgcaccgcccaatacccgtatcccaacagcgcccagtggccgacgtagcgcatcaggcgcccccaggagtcttcccggtcgcgcggcgtgccgccgatatagcgcaccaccagcggatcggcccacagagcggccagcgagtcgaagtcgtccagcgtgtgcgcgtccagccgcaggcgttcggtgataagcgttggcgcggtgttgattacggtcatgttgctgctcctgcacagggtgaaaggcgatgaaaaacaacggcgttcagtatgccagagaaatcacaccgccagccacaacagccaggtgaacagaaagccgctcaggccgagcagggtggtcagcaccgtccaggtcttcaggccgtcggccaccgacagccccagatagcgcgtgacgatccaaaaaccggagtcgttgacgtgggaaagccccagcccgccaaaacaggtcgccagcgtcaccagcaccagctgcagctgattcaacccgctgaccgcttccgacaacaggccgccggtggtcaggatcgccacggtggcggaaccctgcgaagcgcgcagcgccagcgaaatgataaacgcggcgggcaccagcggcaggccgatggccgtcagcacttcggccagcgccttgccgacgccggattccaccagcaccttgccgaacacgccgcccgcgccggtcaccaggatcaccaccgcggcggttggcagcgcggcgcccatcacgtcaccggcgtgttgcaggctccagccgcggcgcagcgccaggaagtagaaggccagcagcagggctatcatcagcgccactgctggcgaccccagcaacgacagcgcatcgcgcagcgccgagcctgccggcaacagcgtggcggagacggtgccgagcatgatgatggcgatcgggatgacgatcagcgccgccaccaggccagcgccgggcgggttgatgcgatcgctgagcggcgctcgcccttccggccgcggctccggcgccgccagctgcagctgttccagcacctctatcgataacggataggttttgcggttgaggtagttggcggcgaaatagccgatcgcgccgaccggaatacagatcgcgaggccgatgatggtcagccaaccgatgtcggcgttgagcaggccggcggcggcgaccgggccggggtgcggcggcagcgcgacgtgtaccgttaacatcacgccggccatcggcaggccgaacttcagcggcgacactttggcgaccttggcgaagccgtaaataatcggcgccagaatgataaagccgacatcgaagaataccggaatgccgaggataaatgcggcgagggtcagcgcggcgacggtatgtttcggccccagcccctggctgaaacgttgcgccagcgactcggcgccgcccgagtgttcgatcatgcgcccgagcatcgcccccagaccgatgatgatggttaccgagccgagcacgccgcccatcccggcagtcatcactttcatcacttcaccggtcggaatgccgctggccaacgccaccagcagactgaccaccaacagcgcgacaaagggttgcaccttcgccttaatcaccatcaataacagcagcaccacgccgagtacggcaatcagcaacagcagagaggtagacatgaaaaaagcctttcgttgggtaagcgttgggcaccgcgatcgccgcgtggcgatacgggtgcgtttcattgttataaaatcgttttcctggtgtcggcgtgcgacgttagcggtaaggcttcagccagccgagcccggcggcggtgtcgccgcgcggccgatattcgcaaccgatccagccctgatagccgagcgcatccagcctgtcgaacagccatgggtaattcagttcgccctcgtccggttcgtgacgatccggcactgaggctatctggatatgcgcgtagcgcccggccagcgtctccagcagcccgctgatattgccgtccactaactgcgcgtggaaaaagtcgaactgaatgaacacgttcggtctctcgatcgccgtcaccacctccgccgcctgatgttgactggcgaacaggtagtcgggcttgaccggtgggctgagcgcttcgatcagcaccttgacgccgtgcggggcgaaggcgtcggcggcatagcgcgcattggcgataaaggtgtcgagataacgttgccgatccgcgcccgcgggcaccacgccggccatcaggtgcacgcagggacaggaaagggcgatggcgtaggccagcgcgcgatcgatatcagcgcgcgcatcttgctcgcggcccggcagcgccgccagcccccattcgccggcggcgacatcgccgggcgcggtattgaacagcacctgttgcaggccgtgttcgcgcagcttttcggccaacagctcggcgggatgctcgtaagggaacaggaattccaccgcgttgaagccttgttcggcagcggcagcgaagcgctctaggaacggcacttcgttaaacatcatcgataaattggcggcaaatttaggcatgggtcagctccgtaattcggcaatttcatcatcggtcaaatagcggataggacgatcgccgagggtgaagatcagccgcgccgcatcttccatctcttcggtattgtccgccgccgctcgcaggtctttaccggtcaccaccggcccgtggttggccagtaaaaaggcgcggtgggccggcgccaggcgcgccagatcctgcgccagcctttcgtcgccagggcgatagtagggcaccaccggcaccttgccgacgcgcatcaccacatagggggtgaacggtttgatggcgttgtcgacgtccagcccttgcaggcaagagagcgccgtgaggtaggtgcaatgcaggtgcaccactgctttgcattccggattgttcagatacagcgctcggtgaaagctgatctctttcgacggcttgtcgccggacagccaatcgccgttcaggctcactttagacaggcgatcggcctgcagctcgcccaggcaagagccggtcggcgtcgccagcagcgccccgtccggcagcaacagcgagaggttgccggcggaaccggtggcgtagccgcgttggaaaaatgaggcgccgaggcgcaccatctcttcacgcgcttgctgttcggtcgtcatgctcatactggaaactccgtttgcgcgcgtgagaagaaggcttcatcgccaaaattgcctgatttcagcgccagggaaatcgcccgatcgctggcgcgcacccagggaacgccgggagaaatgctggggccaatatggaagccgcgaatgcccagcgcctgcgtgaccacgccggaggtttcgccgccggcgacgataaagcggctgaatcccaactggcgcagttgcaccaccaattcggcgaacagcgcttccaccgcttcgctggcggcggcgccgtgctgccgttgcgtttgctgcagcgcttccggcggcgcagtggcgtagatcagcggggcaagcgcctccccggcgtgatgctgcgcccagtgcgccaactcggcggcgtaggcggcgcgtgcctgtggttcgaggcaacggccgatatcgatggcctgcgccgaagcgcgctcgcggtagtgcgccacctgccggttagtcatcacagaacacgagcccgacagcactgctgccttttccccctgcggcgcgccggctgcctctgccgcacgatcgccgctttgcgcccattgccgcgccaggccgatcgccaggcccgaaccgccggtcaccagcttcatcgttttcaacgcttcaccctgaatgagcagatgccgctcgttgagcgtatccagcaccgcgtagcgcacgccttcctgcgccagttggcgcagcttctcgctgaccgcctcggcgccgcgatccatttccgccgccgtcaccagcccgcaacgcccggcggcctgggattccatcaggcgcagcaggttgctgtcggtcatcggcgtgaccgggtgatgacgcatgccggactcagacagcagctgttccccgacgaacaggtggccctgatagaccgtgcggccgtttaccggcaacgccggtgagacaaccgtgaaattttcccccagcgcggtgagcagggcgtcggtcaccgggccgatattgccctgtgcggtgctgtcgaaagtggagcagtatttgaagtagaactggccgcagccctgtttttgcaaccaggccagcgcctgcaacgacagttcgaccgcctgttctgccaggcaggaacgcgatttcaggctgatgaccgccgcctgtgcgtttacctgcgtttcgtcctgcggcacgccgttcagctgcaccgtcggcaggccgttttgcaccagaaaactggcgatgtcggtcgcgccggtaaagtcatccgcgattacgccaagcagcatcagagcgcctcctttttctgcggtagatcgatgccggcaaagattttgattaccgcgctgtcatcttctttaccgtagccggcgttgctggcggcggtaaacatggtgaaggcggtggaggccagcggcagcgggaagtgcagcgccttggcggtatccgccaccagccccagatccttgacgaagatatccaccgccgatttgggcgtatagtcgccgtcgaccacgtggcgcatgcgattttcgaacatccaggagttgccggcggcgtgggtgaccacgtcgtacatcacgtccagcgggatgccggcgcgggcggccagcgccatggcttccgctccggcggcgatgtgcacgccggccaacagctggtggatgatttttaccgtcgcgcccagaccgatggtctcgccgatgcggtaaaccttgccggcgatggcgttcagcacgggttgcagacgctcgaaggtggcgtcggcgccggcggccatcaccgtcatctggccttcctccgccttggccgccccgccggaaaccggcgcgtccagcatcgccaggccgtagtccagcagccgttgctcgatctgtttggcgtcatcggcggaaatggtcgaagacaccatcaccgccgtgcccggcttgagctgtggcgccaggccttgctcgccgaacaggatttgcttcacctgcgcggcgttcaccaccagcagcagcacggcgtccagctcggcggcgaagtcgcgcgcgctggtagacgcttgttgcgcgccggcctgttgcagcgccgccagcgcctgcggattcaggtccgccccgtaggtggtcaatccggcgcggaggcatgaacgcgcggcgcccatgcccatcgcccccagcccgatgacgcaaacggcataattccctgggtgtgtcatactgcactcctgttaattttagtgataatttgttttgttgtgttaaatgtaagcgcttgtcggccgattatccgcgatcgttatcacaataattaacaatgtgtgaaacggatttttcgtctgatttctggcctgaatcaacattactattatgtttttaaataagtttatgtttacctggcctaactgcgtgcgccgtcacgccgcgaaaatttagggctatcggcgaacgaaaattgacgtaaaatcacaattattatcaccgcagcaacgagagggaaccgtgatacctgtagaacgccatcaacaaattcttgcgctggtatccgaacgcggcgtcgtcagcattgccgagctgaccgaacggctgggggtgtcgcacatgacgatccgccgtgatttgcaaaaactggaggaacagggcgcggtgcagtcggtctcgggcggcgtacaggcgcccgagcgggtggcgagcgaaccttcgcaccaggccaaagaggggatgttcagccggcagaaaatcgccattggccggctggcggcgcgacaaattcccgccaacagctgtatctatctggatgctggcaccaccacgctggcgctggcgaaacagatcggtgaacgtgacgatttgacggtggtgaccaacgactttgtcatcgccggcttcctgatcgaacacagccagtgccgaatcatccacaccggcggcaccgtgtgccgggaaaaccgctcctgcgtcggcgaagcggcggcgcaggcgctgcgcggtctgtttatcgatctggcgttcatctccgcctcttcgtggagcatgcgcggcctgtcgacgccgaacgaagataaggtgatggtgaagaaggccatcgtcgaggccagccgccgccgcattctgctcagcgatacgtccaaatacggcaaggtcgcgacctacctggcgctgccgatcgccgcctttgacgccgtcattaccgacgaggggttgcccgccgccgcgcgggaggccattgagcaagcggggattgcattgctgacggcgggagaagaggaataagaacgaagcggaatcaggatgaaagttcggtatcgatgccacgtgtgggcggttcactggcttcaacgccgccgcgttcacgccattcgcggcgcctttgttcagcccattcctcgtggaaggcttgcatctctttttggtgccgttccttcgtgctcataggggttgggtgggattctgccgttaacaggcgggatttcgatgacatataatccgtcctcaataagcgcttggttgtacaaataatgtacgtgatgcgcgtgttttttcaagagcgagtcataaattctggctaacgctggcctgagcggtacgctgaaaactaatcttgcttggtattgcgtcacaaaagtgacgatcgccaggccgatgccattaatgaagagttgttctcgttcataccgggtgtacgccatcctggtataggtatcaaataaggatctcgttacttcggcgcgattttccaatgctcttacatcgtacagttccatgacgtaagcattgtccaatacttccgaggcaggataagccccaataagccattgacgcatccttaacgtcgcttttttaaaatcaaggtaatacgcagcaacgctgctggcttttttataaaccgttattcgatacctatactccgtgacaggtcgtgcattgatctccctcacatcaatctccatgataaaatcctttttactattatttttcctatagttatcccctttgtgacaaacagattattaaccgcggcggagaggctcctccagccgccgatgaaggttgtgcgcagcgccgcgcaaaactaaatgccgctgaaccagttgtagccctgatcttcccagtagccgcccggattgacgtcactgacgaagatcgcggcgatatgtttggcgtttttgaaccccaacttggttggcacgcgcagccgcagcgggtagccatagtccgccggcagcgccttgccgccgaagtccagcgccaggatggtctgcgggtgcagcgcggtggccatgtcgaggctggagtagtaacgatcggcgcatttgaagccgacataaccggcattcagatccgcgccgacatgctgcagaaaggtgcgcagcggcacgccgccccattggccaatggcgctccacccctcaatgcagatcaggcgcgtgatttggctttgctgcggcagccgctgcagcttttccagcgtccagggcgcttttttctccactttccccgcgacctcaagccgatagccggcgagatcgatctcggggacgttgtattccgggtaaaatgcgttaaaggggaaagggtgggtgatctggtccggccggtaagtttgcgccaaccgctggccgctgaacagccaggcctgcacccggtcgttccagcgcgacatggcccacagcaccttatccacccgatcgccgtcttgcaggttgcaaccggtcagcatggcgatgccgcccagcgtcagcccggagcgcaacatcagccggcgctgcagattgaccagctgctttttttggtccggttccagcgtcggcgcggttgcccgctgttttttctcattcatgtttgccacccgttatcatcgcccacagggttttgggcacgacagccaccataaagacgtggatcaccacaaacaggccgatgccggccatggcgaagaaatgcacgtagcgcgcgaagtcgaagccgccaaacagcgcgaccaatccctgcagctgaaccggtttccaaatcgccaggccggacagcaccagtaatagccccagcgccagtacgccgaggtacatcagtttctgaatggcgttatagtggccatgccggtggcgcaggcgcagcgtcatagccagccagatatcctgccgcagcgcgtcggcgcgaagcggcaacagatcgcggcgaaaatgaccgctgaacaggctccacagcagatagcagacggcgttgagcgccaatagccacatcaccgccaaatgccaaccaatcgcgccgcccagccaaccgcccagcgtcatctgcggcggaaagcgaaaatcgaacagcggcgaggcgttgtagatttcccaaccgctcatgaacatgcacaccatggcgaacaggttgatccaatgagtgatgcgaaccggccagcgatgcaccggcggcgacgcgttggtcttcatggcattcctccggttacatcggcggcacggtgccgtctttgccggcggaaatgcgggtggcgacgcgctcgcccttttcgttggcggcggagaacagcacgatgtgcacgcccggtttcagcaggctcagatcgcccggatccagcgtcacgatcggcacgtcttccggcacgacgacggttttctgctggttgccgtaggtgacggtcaggatgcggccgttggatttcaccagtttgccgacggtgccgttggtcatggtgtccactttgccgtcggcggattcccaggccgagtgcccttcgccggtgccgcgcaggctggcggcgaacacatgcacctccaacgccttgagcgtgccgtccggctgcggcacggcggcggtgccgatgaagctgtccggtttgatatcgtccagcgtggctttggaaacgctgagcactttggtctgatcgttcagcttgacgctgagggtctcgcccttgcgatcggtcagctgcaaattgccgtcggcaacctggctgatggtgccgcgcagcggcgcaatcaccttgcccggcggttgggcggcggcggccaagccgctggacagcagcaaggtggataacagtaaaccggctatacgatgacgggtaatcataacgttctcctgaaatgagtttgccggttaagcatggttgagccattgggtcagcgccatggccgtttgatgacattaatgtcatcaagtttgtccgccgaagctgctagtatttttgcagacgtaacgaggtggcgagcatgcgaatactggtagttgaagacgatatcggcacaggggattacctgaagaaagggctgggggaagcgggctacggcgtcgatttggcgcgcaccggcaccgacgggctgtttcgcgcgttggagcaggactacgatgcgatcgtgctcgacgtgatgctgccggggctggacggctggcagatcatcgaggtgttgcgcaagaaaagcgacgtgccgatcctgtttctcaccgcccgcgacggcgtacaggatcgcatccacggtctggagctgggcgcggacgactatcttatcaaacccttttcctttaccgagctggtgctgcgtttgcgcaccttgctgcgccgcgggccggcgcgcgaagccgatcattacgccatcgccgatctgcagttggacgtgctgcgccgccgggcggtgcgccaggatcaggtgatcccgttgaccaacaaggagttcatgctgctgcatctgctggtgcggcgcgaaggcgaagtgctgtcgcgcacgcagatcgcctcccaggtgtgggacatgaatttcgacagcgacactaatgtggttgatgtggcgatcaaacgcctgcgcgccaaaatcgaccggccgttcgacgtcaagctgatccacagcgtgcgcggcatcggctatgtttgcgagccgcgcccgtgaacgcccgcgcttcacgtcggccggtgtcgctgacgctgcgcaccgccatgctgttcgcgctggtggccgcctgcgtggtgagcggggcgggctggtatctgttcggcgccatgcgtcaggaaatgacgctccgcagcgatctgcaggtgaccgggcgcgtagagtatttccgccatttattggggcagcgctttcctttggcgcgcctgacggctaataacggcctgttcgaaaatatgctgggcaatgaacaggatgtgttgattttccaaatgccggggcaaaaaccgctcatcaatgtgaatccggccagggtggccctgccgccgatcgcgccgacgccgcccgaacaggcgcagacgctggccgccgtgcgcggcggggaaacggcgcagggtgtgccgctgcgcgcggcgtcggcaatggtgcgcctggaagacggcagtttgctgcagatttccgccgcgcacgtgatggtcaacgaacagaaaatgctggcgcgttacctgtggcgcattgtcgcggcggtcattgtggctttcctgctgattgcgctgctgggctatggggtcatgcgccggggattgaagccgctatggcgcatggcggcgcaggcgtcgcagatcgcgcccaatacattgtcgacgcgcctcagcgaacagggggcgccgaaggaattgcagcagctgacccgttcgttcaatgcgatgctcgatcggttgaatgaaggctatcagcggctgacgcagttttccgccgatctggcccatgagatccgcaccccggtgggcgcgttgatgggccagtgtcaggtggcgttgtatcagccccgcagcgtggaggagtacgaaaccctactgtcgaacaatatggatgagctggagcgtatttcgcgcatggtggaaaacatcttgtttctggcgcgcgccggtgaggcgcagtccgcgctgaactacagtcgtctggatgtggcggccgagctgcggcgggtggcggattacttcgaagggctggcggaagaacgcggcatcgcgctgagctgcgaaggggaaggcgagctgaaggcggacgcgatgttgttccagcgggcgctgagcaatctggtggccaacgcggtgcgctatgccgatgaaaacagcctgatcgtattgcgggctgaacggcgcgccgatgcctggtgggtgcaggtcatcaatcaggggccgccgatcgcgccggcacagctggaaaaactgttcgatcgtttctaccgcgccgatcccgcgcgcagcgccggcagccatgccagcggtctcgggctgtctatcgtacgcgccatcatgacgctgcacggcggtgaggcgcgcgccgaatgtaccgggcgcgcgtctgccgccagcctcattttcagcctgcggttcccgttagcgcaataaccgttaagccggattaacgcggcggaatggcaaagcggaagcaggcgccgctttgcggttgttcgatcagctgaatatcgctgtcgtgcagctgcagaatgcgccgcacgatcattaaccccagcccgcccgcagggcgccgggcgccgctcaggacagacggccgcacgaacagatcggcgcgcagcgtctgcggaatgccggggccgctgtcgctgacctgcaccatcacccgatcttcctgccgccacagccgcacgccgatgtcgccgccgggcggcgtatggcgaatggcgttgtccagcaggttggtcagcacccgctcaatcatgctgagatcggcgaacaccggcggcacgccgggggcgatgtcggcatgcagccgctgattacgcgcctccgccgccagctcgaacttttggaacacgtcctgcaacagctcgctgagggagaagggctctttctgcggtttcaccacgccgtactccagccgcgccagctcgaacagctcctgcgccagcttgcccactttgcggctctgcgccagggcgatctccagatagcgccgccgatcggcgtcgctcagggtggcggccttgaccgacagcgtttccagatagccgtgcagcgaggtgagcggggtgcgcagatcgtgcgagacgttggcgatgaattcgcgccgcagccgatcctgctgcgccagcgtttgccactgttcggcgaggcgctgcgccatgcggtgaaaggcctgttgcagctggctgacctcgtcgcgcccggccggcgccgccggccgcgccgcgtaggcctgcaccgcctcgatgccgccgctgtccagcgcattgacctgacgggtcaggcgccggatggggcgagtgacccagtagaacgcgaaaccgccggccagcaggctgaacagcaccatcaccccggaggtccacagcgccatcctggccgccgagttgaactgggcgttgctggccagcgccgtgtactcttcaccgagcaagaccacatacagatagccctcgacccggccgtcgaccttcagcggcgcaacgctgaacaccttgcgcccgtccgcgctgcgcggatcgtcgccgtacaccggcatctgcgcaccatcgagcagcgcctgcagcggcgccagcgcgacccgctgccgcttcagatgcccggccggcgcggcgttgccgataatcgtgccctgtttgtcgagcaggtaaacctcaacgctgggattcaccgccatcagttggtcgaacagggtatgcaccgcctgcggctccggcccgttcacccccagcagcggattgctgtcggcgatatgctgcgccaggttgccggacaggcgctggatcaccgcctggctgtactgagtattgctgcgcacctgcatccaaccggaaaaggcgcagccgatgacgatcagcagcgcgaagataatcgtgaggcgttgcgctaacgtaaggtttttcatggctcactcttgcggcgcggccgcgaatttatagcccatgccccacaccgtgaggatgcgctcgggttccgccggattgcgctcaatcttgatgcgcagccggttgatatgggtgttgacggtgtgctcatacccttcgtgctgatagccccagacctgattcaacaggctgaggcgcgagaatacctggcccgggtggcgggcgaaaaagtacagcaggtcgaattcgcgcggcgtcagctcgatcggctgttggtgcaggcgcacctcgcgggcgataggatcgatggtcagatcgttgaagctgagcgcgccggcgtccaggcgcaggttgcggctcatcgcctcctggcggcgaaacagcgccttgacccgcgccaccagctccagcatggaaaaaggtttggccagatagtcgtcagcgcccagctccagccccagcacgcggtgcacctcgctggagcgcgcgctggtgatgatgatcggcgtgtagcgcgtcatggtgcgcgcccggcggcaaatctccaatccgtcgacgcccggcaacatcagatcgaggatgagggcgtcccagccgccctgttccagcatcgccatgccctgattgccgtcggcggcgtggctgatggcgtaaccctcgtcacgcagatgcagctgcagcagatcggcgatgtcgccgtcgtcctcgacgatcaaaattcgttttggcttgtccattctcattaccgctgattgcccgattctctctgaagtctacacaaccgccaccggcggagttatcacattttatttaactttgcgtgaggtcttggggaacaaatccggggaatactgggctcatcgcatcgttagctggcaggaatcgctatgagcttcaccctcaccccggaacaacgacagacggtacatcctctctggctgcggttgacgcattggctgaatgcgctggcgatgctgatcatggtcaccagcggctggcgcatctataacgcctcgccgctgttcaacttcagctttttcaacgagctgacgctcggcggctggctgggcggcgcgctgcagtggcacttcgccggcatgtggctgtttggcgtcaacgggctgtgctacctgctgcttaacctcgccagcgggcgtttcaaacgcaaatattggccgctcagcccgaagcagtttctcgccgatgtcggcgcggcgctgcgcggccggctgcagcacgccgacctgcgccactacaacatggtgcagcgcgtggcctatctgtcggtgatgctccttggcgtgctgagtgtgctgtccggactggtgctgtggaaatcggtgcagtttccactgctgcgcacgctgctcggcggctatgaagcggcgcgctatatccattttttcgccatgtcggcgctggtggccttcgtcgcgatccatctggtgatggtggcgctggtgccccgcacgctgctggccatgctgcgcggacgttaaggagttcacgatgaaaaaggataaaccgatcatgacgatcgttgaagggcaggcgatcgtcaaagaagcgcagcgcttgttgaccgcgtcgtcccgccgccgctttctgcgcaacggcctgacgctgggcggcatcgccatgctcaccggctgcgatctcagcggcaacgctaacgtcgagcaggcgctgagccgcatttcgcgtctcaacgatcgggtgcagggctggctgttcaacggcgatcgcctggcgccggtctacccggaatcgatgatcacccggccattcccgttcaacgccttttacgccgaggaggacgcgcccgacatcaacggcgacgactatcggctggaggtggcggggctggtgcaggacaagcgcgcctggagcctgccgcagctgcatcggatggcgcaggtcagccaggtgacgcgtcatatttgcgtcgagggttggagcgccatcggcaagtggggcggcgtgccgttcgccacctttcttaaggtaatcggcgcggatctgagcgcccgctacgtcagcttcaaatgcgccgacgactactacaccagcatcgatatggccaccgcgctgcatccgcagacgattatcgcgctgacctacgacggccagatcttgccgcgcaagtacggctacccgatgaagctgcgcatgccgaccaagctgggctacaagaatccgaaacacattcaggtgatcgaggtcaccaaccgcttcccgggcggttactgggaagaccagggctacaactggtttggcggcagctgaggcggccgccggccattctccggcactccggtgcctttgacatgacggaaggaaataccatgaaaaagttattcgcaatgatgatgtgcagcgcgctgatgctgggcgtggccggcgccaacgccgcggacggcatgagtaaagacgcgatgaaaaaggacggcatgagccagatgtcgcacgacggcatggcgaaagatgggatgaagaaagagtgcatgggcaaggactgcatgaagaaagacaaaatgggcaaagacgccatgaaaaaggatggcatggcgaaagacagtatggccaaagacggcatgaagaaagacgagatgaaaaaggatgcgatggggcactaagccgcctcaccccgcggccgcaagcggcaaaccgcggcggctgcgggcagcataaggagagaggatgatgttggcgacatggctgcggcgctttcagcgctcgaacggggacgttatctttatgcgcgcggcgttggtggtgattttcgccgccttcggctacgccaaatggtttgattacgaggcgcaggggctggtgccgctgatcggcaacagcccgctgctgagctggatgcatcaggcgttcggcattcgcggcgccagttatgcattaggcgtcgctgaatggagcttcggtttgctgctgctggcgggattctggtcgcggcggttggggttgctgggggcgatcggatcgacggtgacctacctgatcacgctgacgctgatcttttccacgccgggcgcctgggagccctccgccggcggttttcccgccatggccggggccaccagctttttaatcaaggatctggtgttgctggccggctccctggtgctgctgaaagccgacttgccggccgcgcagtgaccaatactaatatggttgacacaatttagccctaaaaagcccgatgtactcatcgggcttttacattttagcgacagaatggttactgcatgtttgtattttaaccaatccctttttttattaataatatagttgtgatgcaaggagttcagtatctggctgtccggatatttttattaatgcatctgagttatcaaatattttgttattattaagatccaccacgatatacgtatcttttttcaaattactgtccagagtggaaacgacaccagccttccctttaaattgcaatgggttttctgggtctgaaatgaactctatatatccatagttgtccaagctactccctccactaacgttatctacgaaaggtattttctcccctttttttcttcctgaaatataaaaattatcatcactgagagcgataatatcttctcgtgcattaaaatcataaagagtactggtgtttttagcgattgacataatattaaacatgtccgccccttttcctccaatggctgttacgatatcactcacgtcaaaataatcgtccccatcgccgccgatgagttttatagtgcttgatacctctcggtatattgaattcgagagtgcaaatttattgccttgcgaaccgccaaaaatgacgatgttcttacttattgttgtaaataaatcaggttcaatcgaaagatctacaccagagttttttgaagcatcaatagtaaattcagtagtattgttatctcctccaagaatagcattcaattttattttgtgtgtgccttcaatagttattttttcaacatgtgacttggttaattttaacgtcaaaccatttttgtcatttgattcccctacggtttttatattaacattcctcaggttttcccctattaactcaaatgctcctgcataaataacgcttttagtgccagatgattctaccgatttggttaatgtgtcttcaccatttttttgattggtaaggaagtttaattctgttacatcattcttaaatttcagtgagtaatttacattactcacagagtaaggtccgtcactgcggtttccaatataaaaatttgccgcctctttaggtatgttgatgacggaaactatatctgcagtggcaggttttgattgattcgctgtgtttataaatgagaaccctgctttgccaatttgattaatattccctccactaatgatgttggtgttttcaataaatatatcataatctaaagtgttgctgattactgatgatgttctggatatagtaccatctacattttttgtataagttaatgttgatatttgacctgtgtatttatataagtcgataagcgagaagtttttaaactggtcgagattgcttgtatattggatgctctttgtgtctggagcaccattaatacctttggtgattgttatttcagaacgagtattgataaagttcgcagatattgagttgactccgttaccgccatctgccgtaaacaaagtatttattttatttccggatttgttactattatttcctgtccatccaagaaaatcgttaccgataccaaaattaaaatgagttggcgctgtggtgatatcagctgactgtgttaacattaataatgtgtttgcttttttagacgttaactctgaaatgcttccgttcatataagcgaaaatgaaatcattaacactattatcgggcaaagctattttcacaggttggtttccgctaatgcttatttgcttaatgtttgctgcctgattaaggttaatattgctttttgttgcaagattgatatctattttttctaattttgacatttctattttactgatattatgtagcaacccagaattaacactactagaaagatagttatctgaattgtttgtcaatgttgcataggttttataattcaggctgtctgcaactctaaatatgaattggaacttctcatgaaattcatttgttgtgcccgcggttgtatttagtgcgctgtttattacacttttaattatctcacctttatcggatagggtaacaagttgctgtattgtggcgctatctgcatcatgcccataaacaaaattatacactttttgcgcgtatgcggtaatttctaaatatgttgatatgcgagtgaactcagaagtattgagtaaaatatctaccattttgtcgtagccggtacctgaggccattttttggctccagccaaatagtgcttcagaatttagatttcttcccgcgccagctaaataaagttcggcgataaactcctgatactctaaaggaggcagttctcctgctttataaacatatgaagcgccttttaaatgttcccttgcaacgtgatcttgttcattgttactttcttttaatgtattcattaattttattgcaatctctccacgagatattcccgttgataatagattgacataaaagttcaattcattatcagatgctgaacgctcataaccattctcgaataacttttgtataaatgtcttattagttactttacttagatatggacgatcattaataaatttttctgtggcttgaagtaatgttctttcatggttattgattaatggagcccaatactcaatcacatcacgggtgattcctgcccctaagatatgaaaaacgccttgaatatcagctgtgctatcagtttcattcgttgatgatggggagggagagccaggataaagagcctgatttccgttgtctacaaaatgctccctatctatctgacgttgtaccgggtaattatattcataactattatttatactccagtcgtcgttcaattgaggccatggtgccgtattagttacaagttccttagtaattttgaagagattattattgagattagggttgatatatgactcgtttgaccagagcttaaactctatttctcccatggttctaccgtgaatggtgttaaaaaagaaaaacatgatctcaaagttattatgatatccaccatatatttcttttgcttcaggcgtcttcattagccttgtgattaaatcctctaaacccgcaggtccatttttctgtaaattttcactaagtgattttaaatctttttcaggtgggcttttccgagtgattgcataataaatgctggcaatctgtttttcgtattttatctcagccataatttaattcctcattgtgataatgttttttactaatgacttgcagttctcttttaaaggctaagtaattataggaaagaattgaaagtctggctgaggaaatttctgatattggatgcatggtcatcattttatcgatgctggtaaggtataaatgatgttttttgtttatgtaaaataaagtaactatttgtagtttatagggttttaattgtcttggagtgtcttttaatcttcaaaaaagatacttatgatgttttttgatgaggtttagaataaatatgtattgaattttttggggggatattcccaccaactaataggctggtgggaatggcattattttaatcaggataggtcagggtgccccccggcgcttcgcgatgaatgtgcaggaagttcaggtgcttctcgtactggtcgaggatatcgccaatcacctgttccttgctgtagtccatcaggtcgttgccctgggtgccttccatcaggaaggtttccagccggtagtagtgcgacttgccggagcgggcgcggtaggtgaagcccggcaccgagtagcgcatcggccagatctgatagatgaagttctgttcctcgcccaggtgtaccagcagctccaggtggttcaggcgttcgtcttcggtcggcggcacttcgctgaactccactttcgcgccgcgcaactccagctcgcgcgccacgtcctgcatcgccgggcggcaaaccttatccaacattttctgcgtgtactgcgtgcccgggtagttcatcacccgcgacaggcgctgtttccagttgagcacgtcgtggctggagaccggcaccggcgccagggtgctgagcgcgctggccttgcggtagtcttctacccgcagcgatttatacagcccggccatcacgaagaagatcacgaagctgaacggcaggcccatgatcaccgtggttttctgcagcgccggcacgccgtcggtcatcagcatgccgatggtcagcaggccgatggccaccgaccagaaaatccgcagccagttcggcgcatcattattgatgtcggccaggcgcgaggtgaagttacccagcaccagcgagccggagtccgccgaggtgacgtagaacagcaggccggtgatggtggccaccgaggcgctgaaggtgaagccggggtattgcgccagcaggctgtagaagccgcgctccgggaactgcatcacttcctgagcaaactcggcgttgccgtgaatgatctgatacagcgcgctgttgccgaagatagacagccacagcagggtgaacacgaacggtatgatcagcgtgccgaccacgaactgacgaatggtgcgcccgcgcgagatgcgcgccaggaacaggccgacgaacggcgaccaagccacccaccaggcccagaagaacagcgtccagttgttcatccactccaccggccgatcgaaggcgaagctgttgagcgtcatgcccataaagcggttgacgtaatcgccgacgttaagcaccagcgcgttgagcaggaactcggtgtcgccgaagaacagcacgaacaggatcaggcccagcgccagcagcacgttcagctcggacaggatgcggatgcccttgttgacccccgaggtgaccgagatggtggccatgatcaccgacagcaggatcagcgagccctgcaccgtcaggttttccgggatctcgaacagcaccttgaggccgtagttgagctgcaccacgccgatgcccagcgtggtggcgatgccgaagatggtgccgagcaccgcggcgatgtccacgctgtggccgatcgggccgttgatgcgtttaccgaagattgggtacagcgccgagcggatggtcagcggcagattgtagcgatagctgaagtagccgagggcgatgcccatcagcgcatacattgaccagccggtcaggccgtagtggaacagcgtccagaccattgcctggcgcgcggcctccagcgtttgcgcgtcgccttccggcggcatcatgtactgggtcaccggctcggcgaccgaaaagaacatcaggtcgatgccgatgccggcggcgaacagcatcgccgcccagctcatcaggctgaactccggcttggactgctctggcccgagcttgatggaaccgaagcgcgaggcggcgataaacaccacgaacacgatgtacagcgtcgccgccagcaggtagtaccaaccgaaggtggtcgacacccaattcagcgtgcgggtgatccactgcccggagaagtcggtgaaaaagatggtcattagcgagaaggccaggatcagccccgccgaggtgaagaaaaccacagggttgaggcggtcctgctgcggtttggaggaggtttcgcgtgttgtcatcgtcatcctctgaactgagtaaaatcgtgccgctccgcatttcggggcgcgttggcgccgccgaaaaacgggcgaatgaaggcggcgaccatccccatggggatggcctgagtaacgccgctttcgcctgttgccgaagcaccggagcgcttcgcggtgggaaccgcttacagccactgattttggtcagattcgttaattacctcacaaaaatcagccagttccacaaccagatagtacaaatttttaaccaggcggcaataaaatatatgcaatttttattgaacgttcaatcaaaaaaaagtttaatagtccgcatgatgacctgaatcacgggcgaaacggcagtgaaatttgcccgctgagataaggccgaagtcggttttgtgagagtcgaaatatgccaaaggtaggaatgcagccaatcagaaggcagcagttgattgatgccacgctcgccgcggtaaacgaagtgggaatgcatgacgccaccatcgcgcagatcgcgcggcgggccggcgtttccaacggcatcatcagccattatttcaaggataagaacggcctgctggaagccacgatgcgctatctgatcagccatctgggcgaggcggtgaagctgcggttgcaggcgctgaccgacaacagcccggcggcgcggctgcaggcgatcgtcgccggcaacttcgacgacagccagatcaacagcgcggcgatgaagacctggctggccttttgggccagcagcctgcaccagccgcagctcaaccggctgcaacaggtgaacggccgccggctttattccaacctgtgcgccgagtttcgccgcgttatgccgcagccgcaggcgcggttggcggccaaggggctggcggcgctgatcgatgggctgtggctgcgcagcgcgctgcgcggctccgcgttcaatcaggcgcaggcgctggcgctcacgaccgaatacatcacgttccaactccgggggcaaacgccgcccggaggataactcaaggagatcctatgtcccgttttggcttgcagaagctctatattcatggcgcctatgtagacagcaccgctggaaaaaccttcaacgccattaacccggcgaacggcgaagttctggctgaagtccagtccgccggcgctgaagacgtcgatcgtgcggtggccagcgcggccagcgggcagaaggtgtgggcggcgatgacggcgatggcgcgttcgcgcatcctgcgtcgcgcggtggatattctgcgcgagcgcaacgatgagctggcggcgctggaaacgctggataccggcaaagcgatgtcggaaaccaccgcggtggacatcgtcaccggcgccgacgtgctggagtattacgccggcctgatcccggccattgaaggcgaacagatcccgctgcgcgatacctcgttcgtctacacccgccgcgaaccgctgggcgtggtggccggcatcggcgcctggaactacccgattcagatcgcgctgtggaagtccgcgccggcgctggcggcgggcaatgcgatgattttcaaaccgagcgaagtcacgtcgcttacggcgctgaagctggcggaaatctacaccgaagccggcctgccggacggcgtgttcaacgtggtgaccggcagcggtgcggaggtggggcagtacctgaccgaccatccgggcatcgccaaagtctctttcaccggcggggtgaaaaccggcaagaaggtgatggccaacgcatcgggttcgacgctgaaagaagtcaccatggaactgggcggcaagtcgccgctgattatctttgacgatgccgatctggatcgcgccgccgatatcgccatgatggccaacttctacagttccggccaggtgtgcaccaacggcacccgcgtctttgtgccggcggcgctgcaggcgcagtttgaggcgaaaattctcgagcgcgtgaagcgcattcgcctcggcgatccgaccgatccgcaaaccaacttcgggccgctggtcagctttgcgcacatggaatcggtgctgcgctttatcgagagcggcaaaaacagcggcgcgcgcctgctgtgcggtggcgaacgcgtcacccacggcgaattcggcaagggcgcttacgtggcgccgacggtattcagcgactgccgcgacgacatggaaatcgtgcgcgaagagatcttcgggccggtgatgagcattctcagctaccagagcgaagaggaagtggtgcgccgtgccaacgacaccaccttcggcctggccgcgggcgtggtgacccacgatctggcccgcgcgcaccgcgtgatccaccagctggaagccggcatttgctggatcaacacctggggcgagtcggcggcggaaatgccggtcggtggttacaagcagtccggcgtcggccgcgaaaacggcctgaccacgctggagcactacacccagatcaaatcggtgcaggttgagctgggcgattacgcctcggtattttaactatccccgtcgtctttcgagccgcagccgggttggctgcggccgacactccccgagagccaaatacaccgcctgttgcggatccgcgtttcgcgttttcgtctcatgcagaccaataaagtaaggagataatgaatggaatttgactacatcattatcggtgccggttccgccggcaacgtgttagccacccgattgaccgaagacgccgacgtcagcgtcctgctgctggaagccggcggcccggattaccggatggatttccgtacccagatgccggccgcgctggcgtttccgctgcagggccgccgctataactgggcgtatgaaaccgatcctgagccgcacatgaacaaccgccggatggaatgcggccgtggcaaagggctgggcggttcatccctgatcaacggcatgtgttacattcgcggcaacgcgatggatttcgacaactgggccaaggcgccgggtctggaagactggacctatctggactgcctgccgtatttccgtaaggcggaaacgcgcgatatcggcccgaacgattaccacggtggtgagggcccggtgagcgtcaccacgccgaaggccggtaacaacgaactgttccacgccatggtggaagccggcgtgcaggcgggttacccgcgcactgacgatctgaacggttaccaacaagaaggcttcggcccgatggatcgcaccgtgacgccgaagggacgccgcgccagcaccgcccgcggttatctggatcaggcgcgttctcggccgaacctgaagatcgtcacccatgcgctgaccgaccatatcgtgttcgacggcaagcgcgcagtgggcgtcaactatctgcagggcgacagcaatcagctgacccatgccaaagcgcgccgcgaagtgctgctgtgcgccggcgccatcgcctcgccgcaaattctgcagcgttcgggcgtcggcccggcggcgctgctgaaaagtctggacatcaacgtggtgcacgatctgccgggggtgggggaaaacctgcaggaccatctggagatgtatctgcagtacgcctgtaagaaaccggtgtcgctgtacccggcgttgcaatggttcaatcagccgaaaatcggcgcggaatggctgttcaacggcaccggcgtcggcgccagcaaccagttcgaggccggcggtttcatccgcagccgcgcagagttcgcctggccgaacattcagtatcacttcctgccggtggcgattaactataacggcagcaacgcggtgaaagagcatggcttccaggcccacgtcggttcgatgcgttcgccgagccgcggccgggtgcaggtgaaatcgaaagatccgcgtcagcatccgagcattctgttcaactacatgtcgaccgaacaggattggcaggagttccgcgacgctatccgcatcacgcgcgaaatcatggcgcagcctgccctggacgaataccgcggccgcgagatcagcccagggccggaggtgcagaccgacgagcagctggacgccttcgtgcgcgagcacgccgaaaccgccttccacccgtcctgctcgtgcaagatgggcgaagacgagatggcggtggtcgacggccagggccgggtgcacggcatggaaggattgcgggtggtggatgcgtcaatcatgccgctgatcattaccggcaacctgaacgccaccaccatcatgatcgccgaaaagatcgccgaccgcattcgccagcgcgcgccgctgccgcgcagcaccgccgactactacgtcgccggcgatgcgccggtgcgcaagcagtaaccgacacgccctctcgccgttgagggggagggccgccgtagcaagcaacccctctccatatgctcttccccaaggcgagggggcaactctcttttatcccttatcccatcatgccgccggcagcgagatcgcctgatcgaaactggtgggcgtcgccatgcgccacatgcgggcgtagaactcgcttttgatctccggctgcagcagcgcgcccggctccagatagtaatagatatcggcgtacaccttgatctcggtcggcgtgatgcggcgcagcatatggtgcgaggtcagctgctccgggcggctgacgccggccgccgccagcatgtctgccagcgctttcaccgtattctgatggaagtggtagacgcgttccgccttgttcggtaccaccagcgccttttgccgcagcggatcttgcgtcgctacgccggtcgggcagtggttggtgtggcagctttgcgactggatgcagccgacggcgaacataaagccgcgcgccgaattcacccagtcggcgccgagcaccagcacgctggcgatgtcaaaggcgctgatgatcttgccgctggcgccaatcttgatttggtcgcgcaggccgcagcccaccagcgtgttatgcacgaacagcagcccttcgcgcagcggcatgcccatatagttggagagttcgagcggcgcggcgccggtgccgccctccttgccgtccaccacgatgaagtccggcagaatgcgggtgtgcagcatcgccttgacgatggcgacgaactcccacgggtggccgatgcacagcttgaaaccgaccggtttgccgcctgacagctcgcgcagctgttggatgaactgcatcatttccagcggggtggtgaaggcgctgtgcgaggccggcgagatgcaatccacgccttccggcacgccgcgggtggcggcgatttccgcatctaccttcttcgccggcagaatgccgccgtggcccggcttggcgccctggctgagcttgatttcaatcattttcacctgcgggctttgcgcctgttcggcaaagcggcgcggatcgaaatggccgtcggcggtgcgacagccgaaatagccgctgcccagctcccacaccaggtcgccgttgttttcgcggtgatagcggctgatgctgccctcaccggtgtcgtggtagaagttacccttggccgcgccgaggttgagcgcgcggatggcgttggcggagagtgcgccgaagctcatggccgaaatgttgaagatcgacgcggagtagggctggcggcagtcggcgccgccgatggtgatgcggaaactggttgggtcggcggcttccaccggccgcatggagtggccgatgcactcatagccggtttgatacacgtccagcagggtgccgaacggtttgtcacccatctcgtttttcgcccggcgatacaccagcgtgcgctgggtgcgcgaaaacgggatctcttcattatcctgctcgaggaaatactggcgcagttccggacggatgaactcgaagaagaagcgcaggcggccgatgatcgggtagttgcggcagatggcgtggcgctgctgcgtgagatcgtagatacccagcaccatcaggcaaccgcaggccagggccggcagccagaaccagggatggttgtgcatcatgatcaagaaaaccagggtgagcaagatgctcagcacaaagcaggtatagcggctgaataaggacgacttcataacatctcctgatgtttattttaatccacacgacatgactcacggataatccgtgtgcaaatcgtaaccaacaggagaggatgttgtgtgtctgttgctgctttgtcgccggttgttacattaatttaacctggcggaagggaggggttgccgcgcggcgtgccgcgcaacaagccaagatgtttatttgccggcgacgaagatggtgctcatgctgcgcagccgcagctttttcatcgcgctgtatttttgcgagaagatggttttcgggtgcgtgccgcgtttttccgcgatatgcagcaggctgtcgccgcgcagcagattgaagatcacgtcgctttccgccgggctgagctcgcgggttttctgcacccggataccgcccggttctttgctttccagcagccgctggattttttcctgcagcgaataaagcggaatgcgggtagagaccaattcaacggaaatccccaggatcgacagcagtttcactacgcgctcgtcgtcatagaacaccagcaggcgcgtcttgctgttgtactgctggtgcagggacaccaggctttcgatcacgttgacgctctgttccaggttttgcgaggtgaaaatcagcgcgatatcgtgcttggtgatcttttccgctttggcgccgccgtgcatgaaatcggaaaacaggcggatatcgtacgcgccgtaatgtttcttcagcagcaccgacaggccaacatagctgtacttacactcactaatcacaagaacgttgtttttagacatagggcaaacaccaataccgagttaaaagtattcagctgtaagaagcgagttcaaatccttgatgctggattccttccacagctttccctgcagtgcgtaatatggcatttcatccagccatttcttgtgttcgggagtttcaactccttcgataattaccttgtaatgattaaggtaaaagaagcgcagtaacgcgcgcatcaagccctcgccgccggactttttcataaagtcccagagcagaaaacgatcgagcttaacgaagcggaactggctgttgtacaacgcggaaaaacccgcatagccagaaccaaaatcatcgagccaaaatgaataactattcaatgacggatcgccgtgcacgcgatctttcaccagccgggttgaattctcgctgatctcaaaatgaatacagcgcagggcattaattctctcggcaaagtgactattcgccagcgattgcagggaataatcgtcaacattcaaagtggctatcacttggttttcatgaaaccagtgtttgtatttatcgatcagattgatctgatccatcaaaatctcaatccgggtggcgctgtcggcgtgacgaaagaactgttcaggagaaaaatgggcatattcgctattaaacgtaaagcgagacagacattcaacggccagcaattgtcccgacttcgcgaacattggctgaaaaacataattaatgccgttatttttctctctgaaagaaccgctcatttcccaatccttggattgatatttaacttgttgattttaaatgattaaaaagaaagttactccaggtttattggtaaatttcttatttaaagcgtcaggatggccgaaacgtgtcgacagaccattaaacgcgtaattcgtgccaaagtccaaacgtcgcaatctgttactaaatgtaaatattcgggataatattctgattttcaggccttaacgcaaaatcttgaactctgcagctttcccaaacacagattattcctattcatatgaatcgtcaacatcgatcgataggtatccgccgatagtttattcctatcaagagggggcttatgaatgttttaaacgatttaacattaagaatatgcttagtctatatttcgtccggcaatgagttcatcgaggcaacgctccttttcagcaagggagtgctatcgctgagtgtatgctcagtggcggcaatatatatataagcccgccactgaatcgattattttattgttctatggagctggaaatgaaaaaagtattattgcctttggctgccctggtattgtctgcaactgcttccaacgcaatggcagcaaacggcaacgttaaattcaccggtgaaattgtacagtccacctgtaaagttgttgataaagaccagaataaagaagtttacctgggtaaatatcctaccaccgctttcccaactgccggttctaccagcggtgctaaagctttcgatatcagcctggagaaatgtgaagcgggtaactacaccctgcgtttcgacggtaacaccccagctggccacccagagctgttggctgtaactggcggcgcgactggcgttggcgttgaaattctggataacaacggttctactctgccaatctctcaggaagtggctaccccagctaccgtaactgttgctgctgatggcgataacccaggtgctgcgactttcaacctgcgcgctcgttacaaatccttccaggatctggtaactgccggtcaggcaaactctaacgctaccttcaccatcgaatacaaataattcgctggcaggatagatagagttattggccaaggatggctaaattttgagagttgagacattccgatgaaaaaaattctgactggtattttattcgcattctctgttaatgcctttgccggcattcaggttgatgcgacgcgtgtcatctataacagcgcaagtaaatccgcatcgctctcaatcagcaatgacagcgacgatacctacatggtgcaaacctggctggatactggcgatgcaagccagatgcctaagaatttgccgatcgtggtgacgccacccattttgaagctggctgccaagaaagacgccattttgcgttttatctattccggcagcggtttgccgcaggacagagaatctctgctctgggtcaacgtacaggaaattccgccaacgcctaagcaagataacgtgctgcaggtggcgatccgtactcgtatcaaactgttctatcgcccggattcgttgaaaaccaacctgcaacagcaggcggaagcgctgaagtggaagcgccagggcggcaatttagtcgtgactaacgatggcccgctgtttgtcacgctgggcgtgttgaacctgaagagcggcggcaagagctggaaagtgaacgccgacatggtcaagccacacgacagcctgcgtatttccctgcctcagggggcgcaatcagccaacaatatgtcgtttacctatatcaacgactatggcggtcacaccgagattaaaaacgtcgcactgaattgatttgaagcacttcaaggaatgaaagaaatggcacacaaaagaataacaaccctcgcgccaaaacgtttggtgaagctgattaatggtgtaatttatttttctgctgtgcctttttcattctcacatatggccatggcggaggagcagttcaacacctccttcatccatggcgatgacaatatcgcccaggtggcgtcgttggccagcggggatgacattctgccgggtaaatatccgtttgatatctatctcaacgggcagcgtatcgatcaccgcgaaatcgagttcaagaaagaatccaaagactctccggtagcgccgtgcctgacggccgcggactatcaggattacggcgtaaagctgcccggcgatctgaccaccgccggtgccgcgcaatgctacgcattgccacaacagatctccggcgccaagctgagctatgacgccgccgtacagcgtatggatctggaagtgccgcaggtgtttctgatcccacgcccgcaaggtgccatttcgccgaaagtttacgatcgcggcatcaatgccggctttgttaactataactttagcggcactcataaccgctacggcaacaatcagaacgacaagacttccgactattacttcctgagccttaacaatggcctcaatattggcgattggcgcctgcgcaacaactcgacgttgaaccaacagtcgggcgccggtacgcattggaagaacatttccagctgggcggaaacggacatcgtttctctgcgcagccgtctggtgatcggccagaccaacaccaataacaatgttttcgacagcattcagttccgcggtgtgcagatgtccagcgccgacgacatgctgccggaaagccagcgcggctatgcgccggtggtgcgcggtgtggcgacgaccaacgcgcgcgttgaagtgcgtcagaacggctataccatttacagcaccaacgtgccgccagggccgtttgcactgacggacattttcccaagcaccctgagtggtaacctggacgtgacggttatcgaagccaacggttcgagaacctctttcgtcgtgccgttctcctcggtgccgaacatgctgcgcgaagggatttggaactatcagctgaccgccggtaaataccacgacggcaccagccgctatcagcccaagtttgtccaaggcaccttgtcgcacggtatggcgtatgacatcacgccttacggtggcgtgctggtggcggaaaactaccgttcagcggtcgtaggcctcggtaaaaacctggggaactggggggctgtctcttttgatatgtcctattccgacaccaacctggtgaacggcgatgacaagcagggggagagtttccgtttcctgtattccaagtcgctcaacgattgggggacggaattccgcattgccggttaccgttactcgacctccggctattatgatttctccgatgcggttgccgagcgcgaacgctatgagaacggttattaccgtaacgattactacgatcaaaacgatcgcaacctgggcgtgccggactgggcggaatctcgccgtcgcagctattacaccagccgtttcaacaacaaacgccagcgcgttgagctgtctgtcaaccagcgcatcgccggtaattcgacgctgtacgccaacctcagcaaccagtcttactggggcggatccggtgaagaccgtaccgtacaaaccggttttaacagcagctataaaaatatcagctatggcgtcttttatcaggacagccgcagcaactacggctataaagaccgcagcgtcaacctgaccgtatcgattccgttcagcttcttcagcaaggattcgtcggacatgaccgccagcttcaacgccggccacagcaagcagagcggcaacacctacagcgccggcctgagtggcaccgcgctggatgacaaccgcttgaactatgcggtgcaaagcggtcatgatcgttattcgggccaaaccagctcggccaacgtcggttatcagggcagcatggggaccatcaatgccggttatagctacagcaaagattatcagcagtcttcgttgggcgtggcgggcggtatcgtcgcacactccggcggcgtgacgttgacccagccgctgcagaatacgtttgtgctggtggaagccaaagacgccaagggcgttcgtatcgaaaaccaacccggcgtcgccatcgaccgcttcggttacgcggtgatgacctctgcgtcgccataccgccataaccgcgtggcgctgcgcaccgaagatatcggcaacggcctggatatcccgatggcggcaagagacgtggtgccgacttacggcgcaatcacccgcgtgaagtttgaaacgcacacgggccaaagcctgttggtacacagcaagatgaccgacggcagcgtaccgccgattggtgccaacgtcttcagtgcggatggtaagaacaacggtactgtcggtaccaacggcgatatttatatctcaggtgcctccgcaggggatcgtctgctggtgaaatggggcaacgacgcgggcgaaagctgctcactggtggtgccggaattgaaagcggcgaccgaacagttgatgggttatcaggaactttcgctgacctgcggaaaaccgtaaaaggaaaggatatgtcttctttgttaaagcataagaatctcggattggcggctgggctgctggtcacgctgggcgggttttcgcagagcagctatgcgttgtcgtgtaagcagaacggcagcattcgccaggatatcgtgctggataaggccatcaaggtgtcgacggctaatactgctccgggggcattgctgtggcgttcgcagccctttacctctacgttccagtgctctgatacagacaatatgccgaaaggcgaagacgcatttttgtattgggatccgcagaataaaatgcaaaacatccacaattcaatcgaagtgggtgtgacatttaaagggattgacgtcaagccggtaaagaatcagcgtgagaatgttggtccgggtacagtatgtagcaacccgccacgttgtagcaggccggcgacgagccaaagcgtcaccgtaacatactctatctacattaaagcgaccggcaaggcaccgccggcgggcggaaaaatcacagacaataatgcctattcggtgttccaggttgatggcgtcggcggcttgaacagccgtccgaacagcaactttaacgcctacatctccgggctgggcaatattcagtttatctcctgcaacccgaaaatcaccgtggtggccaacaacggttcgacggtgaactttggcaccattccgcgtcagaatgcggtggtgggtaaaatcgagaagcaggtgccgttctcggtcgccgccaatatgtccgatccaacgaccggtcaagactgcaaaggggaaacgctgcaggccagcttcagcaccacctacccattgcaggataacagcgtgatcctgccgaccagcgacagcggcttcggtattttgatctcgcaggcggcgacgccaaatacgccgatcatgatgaacagcccggtcgatctgggcctggtcaacggcaccatcgttgaaaagaactttatggccagcctgaaatggttgagcaccaacccgaaggtagggccgttcagcgcatcggcgaatattgacgtcaccttcaaataattcggtgtctcgtcaatagagaaagggttcagttctcgcgaactgaacccttttttgtgccttataccgcgctgattaacgcagccccatccagctggtgcaaacgccttccggcggcttgccggcgtaccagcggggcagcgtgggggcatcgtggcgcggttcggcctgcatttctatcggctgcgccggccattctgcgacgtcccagcgggtggtgcggcgatagaccgccggggttttgccgaactgtttcttgaaggcacgcgagaacgaaggctgagagtcgaaatggtattgcagggcgatatccaggatcggtcgtggagtggagcgcagcgcctgcgccgcctgcgaaagacgccgctcgcggatatagctgccgagcgcgtggccggtggtgctgcggaacatgcgctgcaggtgccatttggagtagcccgacttggcggcgacgttgtccagcagcagcggctgatccagatgagtttcaatccagtctagtaaatcgtgaatgatattgacgcgatccatggttttagttctcccgcaaaaacgacattcaggtcacagtgacttagcttaattatccaagaatatgctttgataataggcgtgactacgccgttacgcaagggtaagccggggataaaaaggtggccaaaaatgctctttgaacggcaggggaataaaagaaaggccgcataaagcggccttttcagtaggaagtgacggaaaatcagttagtttccggtttcacttcaatgtagttcagacccagcacgctgctggtgtaaccgcggatcttgttggtcatctcgatatcgccgttcagcttgtggccgtaggacgggatgatctctttcagcttgctctgccattccggcgtcgccactttgtctttgaacacagtttccatcaggtgcagcatgattggcgcagcggtggaagcgcccggcgaagcgcccagcagagcggcgatgctgccgtcttcagagctgacgacttcggtgccgaactgcagcacgccgcctttatccgcgtctttcttgatgatctgtacgcgctggcctgcggtccacagcttccagtcttcctgcttggcgtccgggaagtactctttcaatgcggcgaagcgatcgtcgtcgttcatcatcagctggccgaccaggtatttcaccagatcgaagttatccagaccgacgtgggtcatcggcatcaggttcgaggtgctcagcgagtgcagcagatcaaacagcgaaccgttcttcaggaacttgctggagaaggtggcgaacggcccgaacagcagcacgcgcttgccgtccagcatgcgggtatccaggtgaggcacggacatcggcggcgaacctacgctggccaggccatacactttggccaggtgctggttggcgatctccgggttggtcgtgaccaagaactggccgccgaccgggaagccgccgtaaccgtcggcctcagggatgccggatttctgcagcagggtcagggacgcgccgcctgcgccgatgaacacgaacttggcgttaacggtggtttctttaccgtcgcggttcagatcggcaacggttacgctccaggtctggtcggcgttgcgcttgatgtcgcgcacttcgtggctcaggttcagcttgaacttgtcgctggcgctcagtgcgtcaaccagctggtgggtgatcacgccgaagttaacgtcggtgcccagcggcatgcgggtcgcggcgattttctgcgccggatcgcggccgttcatcaccagtggcgcccactgtttgatttgcgcagggtcttcggagtattccatgccgcggaacagggtgctgtgctgcagcgccgcgtagcgtttacgcaggaagttgacgttgtcgtcgccccacacgaagctcatgtgcggcacgctgttaatgaaggatttcggatctttcaggacattgtttttcacctgataagaccagaactgacgggagatttcgaaagactcgttgaccttcaccgccttgctgatgtcgatggtgccatcggctttttccggcgtgtagttcatttcgctgaaggcggagtggccggtaccggcgttgttccagccgttggagctctcttccgccacgccgttcatgcgctcgtacatgtcgatggtccaggtcggctccagctcatgcagataggtacccaaggtggcgctcatgatgccgccgccgatcaacaccacgtcgacggttttattcttctcttcagccgccgcctgttgcgtaacgccaaacaggctgagactgaaaatcaggacgagtaattttctcattgaattaaatctcttgtgtgtaaattctactcattgcaggtgaaagaatttagcgggagttaccctggaaataatgaagccgaccgcccggcgtgagccgataggcagcaataatgcctttttgttaatagggtttttaacgaaaagtgaactattgcaggccgtccgggtgcaaattgatcggttcacgttactggcggggtattattgtttgcgagaatgttaaaaactacttttgtaactaaaaaaaatgaatataagcaaaaataggccggttgctgtcgtagtaataaacaaagagggaagaaaggtcgtataaccgcgttattttcgggggttaattgtcgcgcaattaaacgttatttcgttatcacacaataattgcggttaaattgcaaatacctatcggtaaccaataataaatggccgccgttgcgggcggccatcgtgcagaaggcggttacttgatgcccatcgcatcgcgcatggtgaagaacagatcggtctgatcggtcaatcccaccacgttggcggcgtgcgggccgtaggccgcgacgcgcaattgggtgccggtgtgcccctgcgactcttcttccgagttgccgtagctgagggtcatcggcgcgccgtctttggtggtcagcatctgggtcaggcccggcgctttggcgtcggcggcgacgatctggctggagtgtgcatggtcggcggtgacgatcaccagcgtgttgccgtcggcgcgggcgaaggccagcgctttttgcaccgcttcgtccagatcgacggtttcaccaatctgcccgcacgggttagcggcgtgatcctgcttatcgatcgacgcgccctctacctgcaggaagaagccgttcgggttatctttcaacagtgcgatcgctttttcggtcatcgccgccagcgttggcgtggccgcggtgcgcgccgggttgttttcgcaggttaccgccggcttgtcgaggttgccgtgatagctggctttcggccccagccagcgcaccggcatgttgccgtcggcgaacagacccagcagcggtttttgctggttggccagcgtaacggcctgcagctcatccgcgttgctcacccactggtaaccctgcgccgccgcctgatctttcagcgattttccttgccattcgccgcttttcgccagctggttgaaggacttcgcgccgccgcccagcgtgacgtcggcgcgggttttcagcaactgctcggtgatggagccgcggccgccgttttccagcgcgttagcggcgcatttctcgctggtttcctccgggccgtagcatttgcgcgaggtgacgtgcgacaccagcgccgccggcgtagcgtcttgcaactcggcggtggagacgttgccggtggccttgccggccgccttggcgatctccagcagcgtcggctgatctttgccgttcacgtccacgccgagcgcgccgttataggttttcaccccggtggtccaggcggtggcggaggcggcggaatcggtcacgtaatccggcttgtgggttttcttgtccagcgagtagtgggtgtattgcccggtcagcggcagggcgtcgatgcccttgaagtaaccgcctgcgccttcagcgtaattgcgcgcggcggtgatctcggaatcccccatgccgtcgccgatcagcagaatcacgtttttcgctgttttgtccgacagcgacgccttcagcgcggcggtctgatcgccggccagacgacgggcgccgcccggttcggcgaggttgccgtgtgcggcgcgttcggtcaggccatcggcattggccgaggtttccgccgcgatggcggaggaacagagcagggcggacagcacggcgccggcgatcagggatacagcaggttgcatggggtaagctccttgtcgtaatacaacaatgtaaataacatcaaattgttacgaaaggagagtagagcagagggatgacaattttatgacaatgaaagacgggatggcccggcggccaccccgtttgacaatcaggccgcgcgcgccggaatagccagcccgcgctgcaccgccggccgcgccagaccgcgctccagccactgcgcgacgcgcgggaaactgtcgaacgccaccagttcgcgcgcctcatagaagccgatcaggttacgcacccagcccagcagcgaaatatcggcgatggtgtagtccgcacccatgatccagtcgcggccttcaaggcgcgtttccaatacgccgagcagacgtttcgattcgtttttgtaacgctccagcggccgcttgtcttcatattcgcgtccggcaaacttgtggaagaaaccgagctggccgaacattgggccgacggcggccatctggaagaacacccactgaatggtctcataacgctgcgccggatcctgcggcaggaaacggccgctcttttccgccaggtagagcagaatggcgccggattcgaacagcggcagcggccggccgccggggccgtcgggatcgatgatcgccgggatcttgccgttcgggttcagcgccaggaattccggcgtccaggtctcgttgttgccgatgtcgatcaggtgcgcttcataaggcaggccgatctcttccagcatgatggacactttgacgccgttcggcgtcggcagagagtagagctgcagccgttccgggtgctgagccggccagcgtttgacgatcgggaattgggtggaatcgagcatggaaactcctcgggttggcggggttgcttaagcgtaccccttgagtattgcagtaaaactaccccgccgccgggttacaccgtgaggtcaaaatgtgcggccagcgcttttttaccggcggggggcagctgcagttcgcggctgtcgagccggcggacgatccagccgcgttggataaaggcggctaacagcgcggcgcccagcgcgccaccgaggtgagagcggcgttcgctccagtccaggcagccgcaggcgaagcggcggcgggtgggagcgggggagcaatcgacgcccagccgcgccagcgcggcctgaccgatgtcgcttaaccggtagtcttcctcgccggtcagccagttcagcgcatgcagccgatcgtgcagcttcaccgccacctcgcccgccatatggtcgtaacaggtgcgagcatattgcagcgaggtgggcgtgctgcttttcaccgacgggcgcggcacgcccgccagcgccatcagaccctccagcgctgcggccaccggttgcccggccagccgaaaatagcgatagcgcccctgtttgacgcaggcaatcagccgctgctccagcagcttcgccagatgtgcgctggcggtagacggggcgacctcgaccgccgcgctgagctcggtggcggtgtaggcgcgcccatccatcaacaggcacagcatgcgcgcccgggtgcggtcggcgatggcggcgctcagcgccgctaaacgatcttctatctcgatgttatgcatacttcgaggttagacgaagtatgacggcgcgtccatcgctagcctgtagctatcgcagtctggtgctgtgcgtccgtgtccgctggatattgatgagcgggcgttgaaatcggtgcagtggcgccgttcactgaatgcgcgcgtgccggaattttaccgttgagaggagacgaggatgattgccgtgatttttgaactgcaggccgccgacgggctgcgcgatacctacctgacgttggcggcggagctgaagccgctgctggcgcagatcgatggattcatttccatcgagcggtttcaaagcctggccgatcctgcgcgcctgctgtcgctctccttctggcgcgacgaggcggcggtgcagcagtggcgcaatctcgagcagcaccgggcggcgcaggcgcgcggccgtggcgaagtgctggcgcagtatcggctgcgggtggcggaggtggtgcgggactacgggctggaaagtcgcgaccaggtgccgcaggatagccgttgttatcaccgtacctgagaaaaagcccgccgccggcgggctttcacccgctatttcgcctcgctgcccaccttcatcgccccggcgtagctggcgcccatcccccaggcggcgccgtggtcgcgagcgatctgcaatacgccccccgccgtggctttacggctccagtcctgctgccattccagcatcaacgctacccagttgatgggcgtggcgcccgcctgaaccagacgctgcatggcgttgttttggctgtctggcgtaatgtcgccggtgacgtccgacaggatataaacctcataaccctcgcccagggcggacagcgccggcagcatcacgcagctggcggtccacagcccgccgatgatgattttcttgcggccggattgtttgatcagatccaccacgcgccgatcctgccagacgttgatggcggtgcggtcgtacacctgcagatccgggcgcgcctgcgtcacctgctggaataccggcccggcgaagcttttggcgttggccgaggccagaatggtcggcacgttgaacactttggcggccttggcgatgccggcggcgttattcaccagattggtttgatcgatagaggaaatggtcatgccgaacatgtcctgcagatcgaccaacagcaacaggctgttgtcggcggtcagcggctgcacataacccgcctggcggctatcggcggcgggggattgcgccagcgcggcgacgggggcggtggcggcgctcaggccgagcatcagggcgaacagggtctttttcattattaactccattattatcagtagattaaattcacttaccactcagggaagcggttggataaagtctacttaggttgttggggttaataatctgtgttttattgaatttataattaactatcaggacataatatggacgtgctactgacgatgcgcgcctttcgccgcgtggttgagcgcaacagtttctataaggcggcggaggatctggcgatcacgccggcggcgttgagcaagcagattaagcagttggaaagtcggttggggacgctgttgctcgtgcgcaccacccgcagcatgagcctgaccgaagccgggcagatctattaccaggaagcctgtcggttgctcggcgagttcgacgcgctggaacagacggttgccgccagcgcgcagcaggtctccggcacgctgcgggtcaatgcgccgctctcattcggcctgacggtgctgtcgccgctgttgccgctgtttatgcaacgttacccgcagttgcaggtggaactgacgctggacgacagggtattggacgtagtggcggctggtttcgatatttccttgcgcattcgccgacggctgccggactcttccctcagcgcccgggcgctgggtgaagtgcaccagcgaatttgcgccgcgcccggctatttggcgcagcacggcatgccgcaaacgccgaatgaattacagcgacacagctgtctggcctattccctggcggaaaggccggggcagtggcagttcaccgccggcgaggagagcctgagcgtggcgttcacgccccggttgatcgccaacaacagcctgatgctgcgggatatgttggtggcgggattgggcatcggttcgctgccgtcgttcgtggcggatcccgagatcgccgccggcaggctggtgcggctgttccctgaacagattgccgacgtgcatcaggtcttcgcggtttacccgacgcgccggcatgtgcagcagaaagtgagtttattcaccgagtttgtgcgagagcatggattgatgacggcgaattgacaacggcgtacggttgtcatattcattagctatgaaaaaatcctaccgcccattcgcgcaaattattatcacccttctccagagggtggggtagcgcgtgtgtcgccaataaaaacccgccggcaggcgggtttttttatccccttccggcaacgaccggagaacgtcatgaaaacctaccctgcagttttacacctgatgtgcggcaaggccggcgcaggcaaatcgacgttggcgcagcgtttggcccagcagccgcaaacgctgttgctgagcgaagatgcgtggctggcgacgctgtatgaacaggagatggccagcctgcaagactacgcgcgctgctccgaccggttgcggcgggcgctgggcgggcacctcgttcagctgctgcgcggcggttggtccgtggcgctcgatttcccgatgaatacgccggacaggcggcgctgggccaaagccttggcggaggaggccggcgtcgcgcactgcctgcactttctcgacgtcagccatgcgcagtgcctgaaccggataacgctgagaaatgcgcgcggcgaacacccgtttacactgagcgaggcggagtttgagcacctggcgcagtattttgttcccccggcggaagaggaagggatgactatcttgcgttatggcgaacgggactgaaaaccggcgccatgacggcgccggcaacagggttaggcttcggcgttaaacgcgttgtggaaggtgacctccgcgcacggcagcgcgccctggaaggcgatggcgcggaagtagtcttgtggcacgcccggcagggtcagcgcgtcctgcgcctggaagccgaaacggccgtaatagctcggctcgcccagcaccacgcagcctgcggcgccgcgttcctgcagctcggccagcagccggcgaataagccggctgccgatccccaggttctgacaggccggcagcaccgataccggcgccagcccgaaccaaccgacggcgccgttgctgagtgcgaccggtgagacggacgcgtgcccgagcggtgtgccattgtgctcggcgaccagcgacagggtgagggctcccgccgcgcgcagcgcattgacgataaactgctcggtgtggctgctgtgttcggcgtgcaggaatgcggcggcggtcagggtggcgatggcgccgacgtcggccggcgtttcgtggcgtaacgtgatgttcatggttgtatcctgattcaataacgctgtgccgaccgggctgcctgcccggccggtatcgatgattaacggttatccagctgcgcccgcacggccttgagcccggcgaaggtgacgcgataagggcgcccctggcgagagaggatcaggcgtttggttttgagcttggtgaaaacggccagcgagcagtcggccaggccgagcccttcgcgggtgtagcattcgacgtgggtgacgcgaccggcgtcgttgcgggtgaaggcgatatagccgcctttggccaacacgtgcagcacgcgttgttccgctttggaaatgttcatgttgggagatcctgtaataaccccagatacgcgcatccccgcgcaaacgcgcgtcggatacgtcagagtccctcgccatgcggcaaggaagcgactatagggtggttacaatctccaacatacaggcctcgggcagtgaaaaacgccaggacggcgtttaagcgcagttaatgtagccaatggccggttggctgtcaatttgccggcgacgcgggccgccggcgcaaggccaatcagaaaggtttggtcggcaggtatttgccgtccagggtgatcaccgcgcgttcgccgccgtccggatcggcgaccttcttgatatccagcttgaagttgatggcgctgatgatgccgtcgccaaactgctcgtgcaccagcgctttcagcgtggagccgtagacctgcagcatttcatagaaacgataaatggtcgggtcggtcggcacgccgccgggaatgctgccgcgcagcgggatggtttgcagcagctgcaccgcttcttcatccagccccagcttggccgccacggtgcgcgctgccggttccggcagcgcatgctgcccgagtagggcggcggtgacaaacgccaggctgaggccggtgccctcggccagcgcttcgaacgtcaggttatggcggatcttggcggccatgatggtgtcggtgagcgcttcgcgcggggcggcgttatgcagagagtgtgtcatgttggctccttttgttggcttaaaaacgggcgatcgccggcgtggcggtcacctcgggatgggtggcgagcggcacgaagcggcgggtttcgccgtccagcgcctcgatagcgccgctggcgatgtcatagacccagccgtgcagcgtcaggcggccctgatccagcgccagggcgacggaagggtgcgttttgatgttgttgagttgggcgatgacgttctcgcgcaccatcgacgcgacccgcgcttcgtcgcaggcgtgcggataagcctgattgaccgccttggcggaatcggcgtaacgcagccagccggcgaccgttggcaggtgatccagacattggcaggtggcgatggcggtcatcgcgccgcagtcggaatggccgcagatcacgatatcttccacgcccagcgcggcgaccgcgtactcgaccgaggcggtcaccccgccgggttcggggccgaaagaaggcacgatgttgccggcattgcggataacgaacagatcgcccggctcgcgctgggtgaccagctccggcaccaggcggctgtcggaacacgagataaacagcgtacgcggattttggcgggtcgccagccgctgaaacagcgccgtgcgttcaacaaaggcttcgcgctggaacttcaggaagccctcaattacctctttcattgtttttctcccagggggtaagcgatgacggcatgatgaacgcttctggctatagggtctaagacccatttataattctggctataggttttactaatagttggggcgctatgctgctgcgacatatccgttattttctggccgtggccgaacagggcaatttcacccgtgccgccgaagcgctgcacgtctcgcaaccgaccttgtcgcagcagatcaaacagctggaggatgcgctgggagcgccgctgttcgatcgcagcggcagaagggtgcagctgaccgacgccggtgaggcctggatgcgctatgcgcgcctggcgctgcaggatctggacgccggcgcgcgggcgatccatgacgtggcgacgctggcgcgcggccatctgcggctggcgatgaccccgaccttcaccgcctatctggtggggccgacgatcgatgcgttctaccgccgctacccggggattacgctgagcattgaggagatggcgcaagagcggattgaggcgctgctggcgcaggatcggctggatctgggcatcgcctttgagatggcgcagtcggtggaggtggaagcgacgccgttgttcagtgagacgctggagctgatggtcggcgccgaacatcccctggcggcgcggcgccggccgctgacgctggcggaatggcggcatctgccgctggccttgctgagcggcgatttcgccacgcgccagtttatcgatcgctactgcacgcagctcggtttccggccgctggtggcggtggaggccaatgcgttgggcgctatcgtcgagatcgtgcggcgcgggcagctcgccacgctgttgccggccgccattgcacgcgagaaccggcagttgaaaaaagtggcgctggacaacgccatgccggctcggcaggcggtgttgctgcagcgccaaggcgcttaccgcagcgccgccgcacaggcgtttatcgccgttttgcagcaacagggcgttacgccaacgccccccagcgctgcgtcatccccagcagatgcaccagcccgaagccgaggcaaatcagcgagctgacgatgataaagcgttggctgcggccggtgtcgcgcagggcgaaagggccggcgacgccgcgcagcaggtagataaaggtgatgataaacagcgcgggccgcagcagcggcagcggcgcgatcaggcccgcgccggacagcgcatacagcgcccaaataaacagcaccagcgcgataccggcggtgacgacggccgggaactttttacccgcttccgccgccttaatgaagcgatcgccggcgccgcacagccgatagccgcgcggcccggcggtgatcacccaaatatgcagcagggcggcgatggcgctcagcgcagcgccgatcagcagcgcggtgttatagaggtgtggcatggttcagcatccttgtcatcaacatgtctggcatcaagcgtagaccagaatgggtaagtcaggccggggggagctcaacggccgacatttgcagcgcttcttcaggcaccacgcgggcctgcgcatcgataaatgccagctgcaccggcagcccgctgtgtttatccaccagttgaacgtgggggctgtcatgcagaatatgccggtggccccatgccatcagcgcaaccaggatgggccccaggctgcgccccttgtccgtcaagacatattcatgtcgctcacgctcgcccggctcccggtaagcgcgtttggccaacagttcttgttctaccatggcattcagacggttgctcagcgcctggcgcgaagcgccgatattctcgcgcagctcttcaaaacggcgaacgccgtagaatgattcgcgcaggatcagcaacgtccagcgatcgccaagcaggtccgcggcctgcgccagcccgcacagggcaagagaaacggtagggagatcgggagattttgacatgggcattttccttcgctagtctaagtcttgtttttagacttatctatattcaaggagagtataatgccatttgttaatgtgcaaacggtgaaaggcatgctggatgaacggcaaaaaagcgaattgctgtcccgcattaccgatctgttggtggagatagaagggcgaggcgatccggcgttcagacagtcggtttgggtcagaatcgatgaacatgcgcccgaacaatggagcctgggcggtgtgaagccgacggcggcgatgattgccgcgaagttcccgccgcgttaattcaactatgccgcctgcgaaaaggataggatgccgcaggcgctcaaaatgtcaccgaaacttcccgcgatctctgtaccccgttgtggcataatgcgcgccaaatcacattccctatgtataaagagcgagcgctgtgttaagcactaacaacatcaccatgcagttcggcagcaagccgttgtttgaaaacatctctgtcaaattcggcggcggcaaccgttacggcctgatcggcgccaacggctgcggcaagtccacctttatgaaaatcctcggcggcgatctggcgccgagcggcggcaacgtgttcctcgatccgaacgagcgcctgggtaaactgcgtcaggatcagttcgccttcgagcagtacagcgtgctggataccgtgatcatgggccacaccgaactgtgggcggtgaaggaagagcgcgaccgcatctacgcattggcggagatgagcgaagaagacggctataaagtggccgatctggaagtggcctacggcgaaatggacggctacagcgccgaagcgcgcgccggcgaactgttgctcggcgtgggtattccggtggagcagcactacggcccgatgagcgaaatcgcgccaggctggaaactgcgcgtgctgctggcgcaggcgctgttctccgatccggaaatcctgctgctcgacgaaccgaccaacaacctggacatcgacaccatccgctggctggaaaacgtgctcaacgagcgcaacagcaccatgatcatcatctcgcacgaccgtcacttcctgaacatggtctgcacccacatggcggatctggactacggcgaactgcgcgtttacccgggcaactacgacgaatacatgactgccgccacccaggcgcgcgagcgtctgctggcggacaacgccaagaagaaggcgcagatcagcgagctgcaatcgttcgtcagccgcttcagcgccaacgcctccaaatccaagcaggccacctcccgcgcccgccagatcgacaagatccagttggaagaggtgaaagcctccagccgccagaacccgttcatccgtttcgaacaggataagaagctgttccgtaatgcgctggaagtggaagcgctcaccaagggcttcgatgacggcccgttgttcagcaagctgaacctgatggtggaagtgggcgagaaggtcgcggtgctgggcgccaacggcatcggtaaaaccaccctgctgaaaacgctggtgggcgacgcgcagccggacagcggtaccgtgaagtggtcggaaaacgcccgtatcggttactacgcgcaggatcacgaatacgagttcgacgacaccctgagcgtgttcgactggatgagccagtggaagcaggaaaaagacgacgagcaggcggtgcgcagcgtgctgggccgtctgctgttcagccaggacgacatcaagaagaaagtgaaggtgctgtccggtggcgagaagggccgcatgctgttcggcaagctgatgatgcaacgcccgaatattctggtgatggacgagccgaccaaccacctggatatggaatccatcgaatcgctgaacatggcgctggagatgtacgaaggcacgctgatcttcgtctcccacgaccgtgagttcgtcagctcgctggcgacgcgcattctggaaatcaccccgaacaaggtgatcgactttaccggcaactacgaagactatctgcgcagccagggcatcgtgtaagcctcgcggcaacgcatcagggcgggaattatcccgccctttttttatccgtcattccccgccgcacacctcgcagtgcggatccttcggcagctttatctcgcggaactgcatgctcatcgcatcgaacatcaacagtttgccgcgcagcggttgactgtacatttttcatagtaagctaagtgcctcagtccccttggcgttatacaaaggatttacgtaaggcaatgttttacaaactttgcgcttttgcgataagacgctcagatgtagcctgcacgttcaaacagccggctagatcagctcttctgagatcaatatgcaatcgccatagcaattaaatttatcgaagtcctgtaatccaagataggtgttgaaacttaatccctccccatgtttggctgcctgttgagatgtaatgctgcaagccagcgataatgccagcagagtttcattccagtatggccgtttcatgccatgtcgcgaaatatgcgatgcggagcgaacacgcgacaagcgttgaggccgcaaaatgcatgatttatggacttcaacatcatccgagtcgtcaaccaacaggatccgataaacctgtgtttgagacaactttttgatgatggtcgatgcaaaatcactgaagccaatgataataaacgtatcccctttttcggcccgcccaggcagctcccggatgacctgaatatcggccaagagagggaagtggtctatcatccggttggcataagcattattctgtaccaccgcataaacatttccaccctgacaattaataatgctgtcatcaatgcaataggccatcaaggcggcatcatctttctgatatttcattacctcgactcggttaactttgttagattcgccaaactcacacgctgtcgaggccggtaatatcaggggtatggattgtcggagatataacggtaatgccgccaacgcggcaaaactggaaaaatggccgacaaccacgtctgcgccccattcaattagctcaatagcggcacgctctcctcctgccgacgatttttcgtcgttgacaattttcaacgtgttttgtttgaactcaggaaaatgcttgaggctataattaatagcctcaataaaggttcgtgtatggctgttggcgtctttccctaacgctatcgccagtccgatctttttcatcgtgtcgtcacaatcacctgttggctgtagttcatcgctttctgttctgtctcctggcgactgtcgcccttaacgcccaggaaaccgataatatcgttccccaacggcggccgtttgatgacgctgccgagtggtgaaatgattttcagcatgaaggtgttcggatcctgcgtaatgtgttcagggacactgatgatgtcgatccgcccaggcgaggagatcaggcaaagcgcaaacgtgtgtttaccggttggcgaataacacaggtagtccggtttctgcccaatcgccatatcaatgaccgctttgatagggcaatagccggcggagatgcgggccataaaatcgaggccgccgccgccaggccgggcggcaatctcaacgatgtagggtttaccctgatggaaccggatctctgcgtgcatcacgctgcgcgtcagcccctgcgccacggcaccggcatgcaccacgtcatgcacgcgttgcagatccagaccatcaagatcggtcggcgtgtgatggacatcatcatcaaacgagttcccttccagggtgacacgatcgacgatggagcccagcaccgtgacgccgtcccaggaataggcctcgatcagaaattcacgtccatccagatacgactcgaccagcagcgagttggggcccagtacgtcagtgatcccttcatttttgaactggctcatttctgatatgccgatcagggctttagggaagaactccgccatttgttcaggcgtgtcgacgcggtagacaaactggctggccgaacccagtgtgggtttgaggatcaccggataaccgagggtcgccgccgcctccagcgcttcaggcagcgtcggtgtcagccgaaattccgggtgaggtgcctgaccggcgcggtgggcttcacgcatggcaagtttgttgcggctttttaccgccgcctcaaccgggatgctcggcagctgcagggcgtcggcgatcatggccgtggcgatcacgctgttctccgcgaaggtgaacaccccgtcaaagtgaaaatcccgatgcagctgtatggccagcgtggtcaaatcgttgatatccatactgtcggaaacgaagaatcgcccggcatgccagtgatcgctatcagccagcccggacaggacatacagctcaataccgtgctgttccacctgttggtagcgcgaattgtagtaatcgccaaattgcccgacttcaatcgccaataatttcattttgtttttcctttaaagaccagggttgatgccaaaagcgccaggaagaccacagccagcgccaacgccacatatccggccaggacagtggtgctatcgaccagctcgccaatggcgtaggtcagtacgacggctgacgtcagcccaattgcgttgctgaagccgaagaaacggccggtgtaatgggaaggaatggtgttgaacatcagcgtgcggcacgagatacgcgccaggccaaaacacacggcaccaagcgggaagaagaccatcagccacggcaacgtaaattgcggctgcagggcaataaatgccgcattcgccacgtagccgaacatgacaatcgtcagtaaggaaaaacgcttctgcaggaacggtgtcatggcggcggcgatggctacccctacgccggccagtgcatcaaccacacccagaacgccggcgccggaggcaaaatgtttggtgaccaacagcaccaacagcatattgctgaccgtcacgatgatgttgccgacgccatacagcagcatcagccagggttttctcacggcgggcaaggtagttgccggcactggttcggaggcggtgtagccttcgggcacttcatctgatccctgtacacgcggcgtcagcatgaaaaacagcgccgcactggcgatgaaggtgatggcgttcagcacaaacacgaaatccacaccaatcagctggatcagaaacccgccgatcgccaccgatgtcaaagcaccaatttgcactgccatttcgagtttggcattgaatgcagccattctgcccgactctaccgaatccttgatgatggcgttattggccgggaagaacatagccatggtcatggacagcataaagctgcagacaaagatgaccatcgagggatcggtgaatgtattgataccggccaaaacgccaatgacgatagccgcgttgaccacgttggtaatgatgcagatcttctttctgtcgtaggtatcggacaacttgccgaacaacaccgagaaaaaggcttgcggcagcgcgatcagaatgaacagtgtgcccacggctttcgccgttcccatgctctgtgaaatgatcagcgcgttggcgatggtgagtataccgctccccagagtggaaaccagcgacgcggcaaggattagattttcgtttcttttgctgatctggcgggttgtcacgttcagcaaaatggtttcattactcattcgttaactccgtgaatggcatactggctgatctgctcggacagcgccggggcgatcttaaaaatagaggcatcgcacgcttcaacggcgatgcatccggtgacatcgtgccggccccagtaagcagtgccttgccgtttttcagccggcaattcaaagtagggcgacacgacgacatccacctggtcatatttaacgcgtagtcggtcaagtaaataccgcttacacacctgcaggtcgtgactgtctggcggcatcgagtaggaaaatcgactggcgctcactttaagcacccgacgttccggcgacggtacacaccatgatcgctgttcatctcccatcgtcagcaccggctttaacaaacacgcacggggatcgttgaggtgcacgtcaaggtgaacctgatattgcggcgccggagcgacgcctgaccggccaatgtgtcgggtgagagggcggctcgccgtgcaaatcaccgccgtgtagcttttacgctcaccgttaacgctaaaatgcctcccctcccgaatggtgccgagatctacgcgcgtatgcggtttcaacgcgatgctgcccgtgtttgccagcgcttggcacaaatgtgcatataccttttgtgcatcgagaagaatggcgtcatggccgacgaagagccgtcgattagaactgtgcatgcgcaacaggctgctctgtgtcgacaacacgggatcctggatgtcataacctatcgccagcgcgtcatacagctgcgccaaacgacgacaatcggcgtcatccaccacacgaatggattgcgtctgacaaccgactgcatcgctgcctgcgccgatgagttggcgccagaaagcaagcgagtgcgcagccagcggttgcaacgcggcattgttttcgtgcgcgtgtttccacagacggccatgtgcccacgacagattggcagcgttcggaatggcggcggcgtcatacagctcaacgcttgcgcccttacgggcgcaagccagcgcagtcatgacgccggtaatgccggctccgatgatggcgatgttaggacgcatatgacccactgttggtgaatgtggcgatcggcggcagttcaggcaaggcccattgttcactgccgttcagcggattggcattcacgatagcgtggtgaaggtcaatcataatcaaccccaagccgtcgacgaggacccgtaactgttgattaattgccttcaggctgatatcgctttcttccgcaaccagctcctgcaagcgcccaatatggtgcaggcaccagtcagccaatcggctttgactgaacgtctcgagacgacagggcagagccaggcgctgacgcatggtgtcgaccagcagaggagtattggcctcatcgtcattctggcgcaattcccagcgttgcgtggcgtatgcacgggcaagcgcattccaggcggaaatcagtcgttcgttaaggatttgactgagggcatctcggctgaaattgttccggttgtgttccggactggtcaggcaaagatagaaacgggcatagtcgcgaggcagggtttttaccagatcgcgggcccagatcaaatggccgcggctggtcgagaacttggcgttttccagctcgtaaaactcattgggcacgatggtgtcaggcaacaggtacttaccctcatgcgccatcagcaaggcaagatgcgtcactccccaaaaataggagttgtcgaagccgaggaaatacgccaggcgattacctgtttcagcacgccaggttgcatccgtcggcgccgcgttgttttcgccacaggcgttgcagtacatcgatgccggcatcccctccgcccaggcgttgagcacttgcccctccgtgccgggaaaatgcgatggcaatccccaggcaatggggtaagtgatagggaaatcgatcagctctcggctgaacagttccgtcattagctgaagaatgtgcaggcgccagctgccttttttcgcggcgtaataacgctccagctcggccctgtatgcttctaccgggaacaccaggatctccgtttctctgtactccagtgattcgtaggggggcaatgtcgccaccgggttttttaatccatcaaagttgttggggtgtccgcaactttcacacaatccaccgcgggactgcgccagacaggtcgggcattcaccggacacgaacgactccaccataaacgtattgcggtgtgtcgagtacggcagcctgacggttttgagccggaacttgccctgctcatgtaggggagacaaaaaggcgtacaccatttctttataaccgtcgtcgaacggggcataaccatccagctcgactccccagtcattcaggctttgcctgatgtcgtcggcagcctgacggcataaattttccggagatgtgcccagtttgtaggcactggtgacaacataggtttggctgtcatcagtgccggtcgcgtagttgacgcgttctccggtcaggcgcaggtagcgggcgtaaatatcgccggccaagtaaggcccggccatgtggccaacgtgcagatcgccattgggcgtgggcggtggggcaataacgagcgttttagacatggtctgacacctgatttttttgttgatgacgttgagcaaaacgtgaggacatctcctcatcccaccaaatgctgtacatttcgaacggctcggggctttcattgagcacgcaatgccgggtgaatggcgggaattgaacggtgtcgccggctttaaagcgcgttttttcaccttcgcacacaataaatgcctcacctttaatggcgacgaatatttcgtattcgtggtgttcatgcggagtcgaagacgtgccgggtgcaataacgcaccatgaactttcaaacggtgcgttcagctcgggccacggcatcaaacgctgggcgtgcagattgttctcgaatcgcatagaagtgcgatcaagtggtttaaaggaatgcatttttttccctaaaatcaggccgtgatatcgtcaataatttcttttgaacggaatgccagtacactcaacaatgaatctgcaatgccatgcgtgctttcattaaccccctgcagatgcagagaaacgccgggggcataaggcaaaacggcgcgataattgcggtcgacgcggattttttcgatatcaagatgatttgacaaactgtcgaagagtgtcggcgttttattcttatatcctgtacccagcaacactacgtcaaaacgcgcagagtgtgagtggcctgacttgttatctttccaggtgatcagcacaccgccgtcatcatctaccgcatgtaaaatatcgcactgtgtcagcattaccgcccgattttcaccacgcaactcctgcaaataatggaaacgataaagccctgacaaagttgatggggccacgccggaatagttggtggtatgcatcgccgccagggtcttttcacgggttgcattgtcacaattgaaatacgtgttgatgtagtcattctgaaataacgtattggtgaattgactgccttcataattcaccagcccgatggagcgcatgatcatggtgatattggccgtggggaaatgctcaaggcaggattgatacatttcggcactgctttgcgcgccgccaattaccgcgatacggttaactctaccgcacttcatttgttcgagagccgtcaggaaattggcactatggatcacattatccggtgagacatgctcaaacacagccgggatattgaggtcgcggccagccccaaaaatcagacggcgggcgcggtaactgtcgccattttcaacggttacgtgccagccagtaatttgcccttccgatgcaagttccggtctgactgccactactttgctgttgtaaataacctgtgttttctccaggccacccgctacccactgcaaataatccgaaatctctttacggtaggggttaaacgtctgcaggttgacaaaactgtccaggcggttggttttatgcaaaaaattgagaaagctgaaccggctggtcggatcacgctgcgtgaccagatccttcagaaaggaaacctgagactgcgcttcaggaaataacattcccctatgccaacaaacagaagtgtctttttccagaatgagagaagagttgatgttgtgaacttcagcacattcttcaagtgcgacacctactgcgaggtttgatgggccgcagccaatcattaatagatcggtgtgttgcattaattttttcctaaatccattttgtgtatagcaaactccgcattattgattgcgaatgattgccacctgtcatttccctggaataaagattttgacgctaattatattatttataacgaccacactttttgtgtgtggaaagaaactagcactccgtaaaatgacaaacaatacacataaagctacaaacgttaacttcagagtaacattttggaatgtgctttagcggcaggatgattcgtatgtatgaacagtatttcttagggttgtttaaaaactaagtagtagaattaattcatggtgctataaatttaatgaatgtttactatttttttataattataactgatcatgtagtgaaagatgttttgctgtatagtaatgccttagaaggagtaaccccatcatatcgacaggcttgatatactaatcagatcatgatagagaaaagagataatgaggtggtaaaccgtatgacaacagtgatcgaagtgctccaatacacgttaaaacccggcacaggcgctgcatttcacgatattatgaaagaacagagtgtacctctgcacctgaaaattggggtgaaagtattacgctttggtaattcactccatgatcctgataattattatctggtgcggtcatttctaaacgagtcagaaatggaaagtcagcttactcaattttatgctgatgctcgctggcgtgaaggcccacgcagtgcgatcgttaatatgatcagcggcagccatcgtgtggtcatgccggctgatccgttgatctattacgcactcggtgataatgagagcggcaacccattttcattccggtgagcttgttgccgactctaatatcttttcgtcttatattgcaataaagcgggtagcttcaatttctgccagaggcattttactttcacaaacgtattggaaaatatattgtgccacgattttccaacaccgacctctcaagctactaatgacgaagccgtcacgccccgccgcacacctcgcagtgcggatccttcggcagctttatctcgcggaactgcatgctcatcgcatcgaacatcaacagtttgccgcgcagcggctgaccgtagtcggccagcagcttgatggcttccatcgcctgcagagtgccgatggtgccgaccagcggcgccatcacgcccgcttcgacgcaggtgagggcgctgtcgccgaacagccggctcaggcagcggtagcagggctcgcccggctgataggtgaacacgctgagctggccttccatacggatcgccgcgccggaaaccagcggtttgcgctgtgcgtggcacaggtggttcagcgcgtcgcgcgccgccacgttgtcggtgcagtccagcaccagatcgcaggcggcgatctctgccgcgaccgcgtcatcttccagacggccgtcgatggcatcgatgcggatatgtggattgatggcgctcagttcctgcctggcggagctgactttgctctggccgatgcgatcgtcgcggtgcaggatttggcgctgcagattggagagcgagacggtgtcgaaatccaccagcaccagatggccgacgccggccgccgccagataaggcgcggcggcgcagcccagcccgcccagcccggcgatcagcacgcgggcggccttcagcttctcctggccgtcgaagtcaaagccgcgcagcacgatctggcggttgtagcgcagcgcttcggcgtcggtcaattccggcaacatgttcagctcctcagcagggcgttgaacggctcgatctccaccgtttcacccgccgccaccgaaccgcgttcgcgctccagcacgatgaaacagttgccctggctgtaggagctgaagacgtgcgagccctggtggccggtggtgctgacctccagttcgcccgcggcgttgctgctgaacacgccgcgctgaaaatcgaggcggcccggcgatttcttcagcggcgtcagcgcccgcgcgcgcaggcgcggcggcaggcgccagtcgctgtggccggccagcttcgccagcagcggttgcaccagctggtagaaggtcagggcggcggaaaccgggttgcccggcaggccgcagaaccaggcgtggcccagtttgccgaaggcgaacggtttgccgggtttgatcgccagcttccagaagctgacctggcccagttcgtcgagcatctgtttggtgtagtcggcttcgccgaccgagacgccgccgctgctgatcaccacgtcagcctggctgtccgcctgtgtaaaggcggcgcgcagcgcgtcgcgatcgtcgcggataatgccgagatcgagcacgtcacagcccatctgctccagcatcaggcgcaccgcgaagcggttggtgtcgtagatctggcctgcctgcagcggctggccgaccggctgcagttcgtcgccggtggagaacaccgcgaccttcagcttacgcatcacctgcacttcggcgacgccgagcgaagccagcagcggcagctgcgcggcgcccagcttcacgccggccggcaacacgctcgcgccccggcgaatgtcttcgcccgccagacggatattctggccggcttctaccggggcggtaaaacgcacgccctggtcgctcacttcggcctgctcttgcatgacaaccgcttccgccccggccgggatcggcgcgccagtcatgatgcgcacgcagctgttggccggccattggccgtcgaacggcgcgccggcgaaggctttcccggcgatcggcaatggcgcattggccgccagatcggcgaggcgtaccgcataaccgtccatcgccgagttggcgaacggcggcacgtcgagcggtgagaccaccggcgcggcggggatgcggccggcggcggcggtcagcgcgacggattcggtttgttgcagcggtgcgatctgcccgagcattttttccagcgcttgctccagggagatgagatcggaagtatggcaatgatccataaggggaactccgtaatcagggtgcgcaatgatagcgacaaagtgcggctattatggcagagaacgccgggggggagaacgggttatgcccgccatctttcgcactgcgccggaagcgcgaacgggtataaactgcctaaaacacaggaggatcatgatgcataaacaggttatcgagttctggttcgacgagatcgaaccggtgatgtggttcaaaaaggacgatgatttcgatcgtctgctgcatagccgcttcggcgaaatctggcgggcggcggcggcgggggaactggcgcactggcgcgacaccatcgaagggcgcctggcggaggtgatcgtgctcgatcagttcagccgcaacctgtttcgcggcacgccgcagtcgttcgcctgcgacggcatggcgctggtcctggcgcaggaggcgatccgcagcggcgagtgcgaacggctgagccgtgagcagcgcggcttcctttatctgccgttcatgcattcggaatcgccgctgatccaccagcaggcgctggtgttatataccgagcttaataacggcgaccagctggagttcgagctacggcataaggcgatcatcgatcgtttcggccgctacccgcatcgcaacgcaatattggggcgcatcagcacgccggaagaagaggcctttttacggcagcccggctcgggtttttaatcgtcggatcatctgcgcccggccgggggaaaaacagcaggccgggcgccacaataagcgtgactcagcgcgaacgtttatttcattacgccatgccgctatttcctctcgcgaaattaccaataatcccagccgcactgtcagcggtttgccgctttttataacctgctgtttttattccaataagctatttcaaggtgcgaaatggtctaagcgcgctacgctaaaagcgggacgtggacgttatgctgtacttccactgtaggactaaatagagtcgaaaaagactgaataataatgataccgcgctcagcttattcgctgcgcaacggcgggattaacacagggtgtcaggcaaatgagcaaaccagtgattgccattcatggcggcgcgggcgcaattacccgggcggcgttgagtgcggaaaaagaacggcagtatatccaggcgctgtccgagatcgtggccgccgggcaggcggtactggcgcagggcggcagcgcgctggacgcggtgaccgaagcggtgcggctgctggaggaatgcccgctgttcaacgccggcaaaggctcggtgtttacccatcagggcacccacgaactggacgcctgcgtgatggacggccgcacctgcgacgccggcgctgtcgccggcgtcagccatatccgcaacccggtgctggcggcgcgcgcggtgctggaaaacagtgagcacgtgctgtttgccgccgaaggcgccgagaagtttgccgccgcccacggcctggaaatggttactcccgacttcttctttacccaggaacgctttgatcagttgcaccgcgcccaggcggagcaggggcgggtcttgcttgatcacgacggcgcggcgcaggccggcgatccgctcgatcccgatcgcaaattcggcaccgtcggcgcggtggcactggatgcgctgggcaacctcgccgccgccacttccaccggcggcatgaccaacaagcaggccgggcgggtaggcgacacgccgatcatcggcgccggttgctatgccaataacgccacggtggcggtctccagcaccggcaccggcgaaatcttcatgcgcggcgtggcggcctatgacgtttccgccctgatcgaatacggcggcctcagcctgcaagaggccagcgatcgggtggtgatggagaagctgccggcgctgggcggcagcggcggcatgatcgccgtcgatcgccacggcaatatcgcgctgccgttcaacagcgaggggatgtaccgcggttttggctatgtcggcgatgcgccgtccgtcgggatttatcgctaagcgttcaccgggagggtgtatgaccgacgtttcattccggcccgccggcgacgggctgccattgccgccgcagcgtgtgctgtcggtgcgcgatctgagcatcagctttcctcaatcggaaggcgccgtggaagcggtgcgcaacctgtcgttcgagctcgatcgcggcgagacgctggcgatcgtcggtgagtccggttccggcaaatcggtgacttcactggggctgatgcggctggtggagcagggcggcgggcgcatcgtcggcggcgccatgacgctgcgccggcgcgacggcgcgctgctcgatctggcgcgcgcctcgcagagcacgctgcgcacggtgcgtggcgccgatatggcgatgatcttccaggagccgatgacctcgctcaacccggtgtttccggtcggcgagcagatcgccgaatcgctgcgtttgcatcagggcatggatcaccgcagcgcgcgccaggaggcgctgcgcatgctcgatctggtgcgtattccggaggctaaagaggtgctggggcgctacccgcaccagctttccggcggcatgcgccagcgggtgatgatcgccatggcgctctcctgcaagccggcgctgttgatcgccgatgagcccaccaccgccctcgacgtcaccattcaggcgcagatcctgcagctgatccgcgtgctgcaacaggagatgcagatgggggtgattttcatcactcacgacatgggggtggtggcggagattgctgaccgggtgctggtgatgcgccgcggtgagcaggtggagcaaaatcgggtgcgcgagctgttcgccacgccgcagcaggcctatacccgggcgctgctggcggcggtgccgaagctgggggcgatggccgatcggccgctgccggcgaagtttccgctgccgggaggcgaggaggatgaagcgccgcaggataccgtgccgccaggcgccgcgccgatcctgcgggtggatcatctggtcacgcgttttgatctgcgcggcgggctgttcaatcgggtcactcgccgggtgcacgcggtggaaaacgtcagtttcgatctttaccccggcgagacgctggggctggtgggcgagtccggctgcggcaagtccaccaccgggcgttctttgctgaaactggtggacagccagagcggcaccatcaccttcgccgggcggcgaatcgatcggttgaaggggccggcgctgcagcacctgcggcgcgatattcagttcatctttcaagatccttacgcttcgctcgatccgcgcctgacggtcggtttttccatcatggagccgctgctggtgcacaacgtgatgcgcggccgggaggcggaacggcgggtagcctggctgttggaacgcgtcggcctgttgccggaacacgcgcgccgctacccgcacgaattttccggcggccagcgccagcgtatctgcatcgcacgcgcgttggcgttgaacccgaaagtggtgatcgccgacgaggcggtttcggcgctggacgtgtcgattcaggcgcagatcgtcaatttgctgctcgatctgcagcgcgagttcggcatcgcttttctgtttatttcacacgacatggcggtggtggagcggatcagccaccgggtggcggtgatgtacctcgggcagatcgtcgagatcggcccgcggcaggcggtgttcgacaatccgcagcatccctacacccgcaagctgatggcggcggtgccggtggccgatcccgctcacgcccacaaacggcagccgctgccggccgatgagatcccgagcccggtgcgcgcgctgggcgatgaacccgttaccgcaccgctggtgcaggttggcgccgggcactttgtcgcccgccacccgatcgccggtgctttttaaagacctcaggagagacaagcgacatgaagcacacattcaaacgcaatgcgctgttggccgccgtactgctggcggcgggaaccggcccggtctgggcggcgaaggacgcggtgatcgccgtggcctccaacttcaccaccctcgatccttacgacgccaacgacacgctgtcgcaggcggtggccaagtctttctatcaggggctgttcggctttgataaggacatgaagctggtgaacgtgcttgcggacagctatgaggtcagcaaagacggcctgacctacaccgtcaaactgcgccagggcattaaattccacgacggcaccgcgttcaacgccgaggcggtgaaggtcaacctcgatcgcgccagcaacccggacagccacctcaagcgctacaacctgttcaagatgatcgacaaaaccgaagcggtggacgccaatacggtgaagatcgtgctgaaggcgccgttctcggcgttcgtcaacaatctggcgcacccggcggcggcgatcatctcgccggcggcgctgaagcaatacggcaaggagatcggtttccacccggtcggcaccgggccgtatcagttcgtgacctggaaccagaccgatttcgtcaaggtgaagaagttcgacggctactggcagccggggctgccgaagctcgacagcatcacctggcgcccggtggtggataacaacacccgcgcggcgatgctgcagaccggcgaggcgaccttcgccttcccgatcccttacgagcaggccaaggtgctggaaggcaacgccaagctggacgtggtggccgcgccgtcgatcttgcagcgttacatcagcatgaacgtcacccaaaagccgttcgacaacccgaaggtgcgccaggcgctgaactacgccatcaacaaggacgcgctgatcaaggtggcgttcgccggttacgcggtgccggcggaagggccggtgccgccggccatcgatttcgccgcccgctataagccgtggccgtacgatccggccaaggcgcgcgagctgctgaaagaggccggctacccgaacggcttcaccaccacgctgtggtcttcccacaaccacagcaccgcgcagaaagtgctgcagttcacccaacagcagctggcgcaggtgggggtgaaagtgacggtgacggcgatggatgctgggcagcgcgcggcgcaggtggagagcgtcggggtgaaagacaccggcgtgcggctgttctacaccggctggtcggcctcgaccggggaagcggactgggcgctgtcgccgctgttctccacccaggcggcgccgccgaagcagttcaacaccgcgttctacagcaatccgcaggtggacaaggatctgaccgacgcgctggcgaccaccgatcgcgccgagaagcagaaactgtatcaggacgcgcaggatcgtatctgggccgacgcgccctggatcttcctggcgaccgaacgcttgctgtcggccaacagcaaacagctgagcggtttctacgtgatgccggatacctcgttcaactttgataacgccgatctgaaataaggcgcccatccccgcctgcggccagacggcggcgggcgggggaaggaatgagatgctcaattattttctgaaacgactgctgggcctgatcccgacgctgctgatcgtggcggtgctggtgttcctgttcgtccacctgctgccgggcgatccggcgcggctggcggcggggccggaggccgacgaggcggtggtgcagctggtgcgcaaggatttggggctggataagccgctgccgcagcagttcgcgcactttttcgttaacgcgctgcggggtgacttcggcatctcgatggtgtccaagcgcccggtgagcgaagagatcgcctcgcgctttctgccgaccttctggctgaccgtcaccagcatgctgtgggcggtggcgttcggcctggcgatcggcgtggtgtctgcggtgtggcgcaatcgctggccggatcgcctcggcatgacgctggcggtgtcggggatctcgttcccggcctttgcgctcggcatgctgctgatgcaggtgttctcggtcgagctggggtggctgccgacggtgggcgccgacagctggcggcactacattctgccttcggtaaccctgggggcggcggtggcggcggtgatggcgcgcttcacccgcgcttcgttcgtcgaggtgctgcaggaagactacatgcgcaccgcccgagccaagggcgtgagagaaagcgtggtggtgatgaaacacggcctgcgcaatgcgatgatcccggtggtgaccatgatggggctgcagttcggcttcctgctcggcggttcgatcgtggtggagaaggtgttcaactggccggggctggggcgcttgctggtggactcggtggaaatgcgcgattacccggtgatccaggccgaggtgctgctgttctcgctggagttcatcctgatcaacctgctggtggatatgctgtacgcggcgatcaacccggcgattcgttaccaatgaggacgcggcatgattaagcattggcggcgcagcgccgcattgaaggcgatgccgcttattgaccccaacgcggtacgcacgccgtggggcgaattttggcggcgttttcgccgccagcgggcggcgctggtcgccggtctgttggtgctgctgctgattgcggcggcgctgctggcgccttatctggcgccgttcgatgcggaaaattacttcgattacgaccggctgaacgaagggccttcgctgatgcactggctgggggtggattccctcgggcgcgatatcttcagccgcatcctgatgggcacgcgcatttcgctggcggccggggtgttctcggtgctggcgggcggggcgatcggcaccttgctggggctgctggccggttactatgagggctggtgggatcgcctcaccatgcgcgtctgcgacgtgctgttcgcgtttcccggcatcctgctggcgatcggcgtggtggcgatcatgggcagcggcatggccaacgtgatcgtcgcggtggcgatcttcagcattccggcctttgcccgcctggtgcgcggcaacacgctggtgctgaagcacctgacctatatcgagtcggcgcgcagcatcggcgcctcggactggaccatcattctgcggcacattctgccgggcacgttgtcgtcgatcgtagtctatttcaccctgcgcatcggcacctcgatcatcaccgccgccagcctgtcgtttttggggctgggcgcccagccaccgacgccggagtggggggcgatgctcaacgaagcgcgcgccgatatggtgatcgcgccgcacgtggcgatcttccccagcctggcgatattcatcaccgtgctggcgttcaacctgttgggggacggattgcgcgacgcgctggatccgaagctgaaggggtgatgctttaacgtatggcgcacatttgaacgggctcacatgacctctcagtgctattatccgttcaataagccgtgttgtttgcacgaagatgagtgacagaggtgccgatgccagtaaaacaacgaacgacgcaaagtgtgaccatgacgctggaacgcagtttgttgagccgtgcgcgtgaggcggggattaatctcagcgcgacgctgactgctgctttagatgctgagttgcgtcagcatgagaggagaaaatggcaggaagaaaaccgagaggcacttgaagcgcttaaccgatttaatgatgagcatggttgctttagcgacgaatacaggacgttttagcgatgcaatttacggtgtatgcgaatagcgggaacagcgcggtttaccccctgctgcttgatgtgacgagcgatatcattgggcaattaaatcgccgagttgtgatccctttgttacccgttgaaaaatacccggggagtacgcgaccggagcgcttgatcccgttgatcagattgattgatgacaacgagtacgccgtgatgacatatgaaatggccagcatcccggttcgggctttgggggccgaattttgtgatgtttcccagtatcggagcaggataaaagccgccatcgactttcttcttgacggtatttgaagaaatccgggcggtttaaccgcccggatttttttatcagcggaacaggtgctcggcgtggaaacgcaggtgatcttccacgaaggtggcgatggtgaagtagctgtgatcgtaccccggctgaatgcgcagcgtcagcggccagtcgcgctggcgcgccagctcggccagccgcgccggctgcagctgatcggccaggaactggtcgtcgtcgccctgatcgataaggaccggcattttctccgcgccgctggccagcagatggcagctgtcgtactgcagccactggctctcgtcgctgcccagataggcggtgaacgccttgcggccccacggtacctggcacgggttgacgatcggcgcgaaggccgataccgagcggaagcgctgcgggttgcgaaacgccatcatcagcgcgccgtggccacccatcgagtggccgaagatcgactgacgatcgctgacgctgaagtgctgttcgatcagcgccggcagttcggcgctgatgtagtcgtacatgcggaagtgacgatcccacggcgcctgggtggcgttcaggtagaacccggcaccctggcccagatcgtagccttcgtcgttcggcacttcgtcgccgcgcgggctggtgtccggcatcaccagcaccaggcccagctcggcggcgatgcgctgcgcgccggctttcaacgtgaagttctcgtcgttgcaggtcagccccgacagccagtacagcaccggcggcgggttgtcatcgcgcggcggcggcaggtagatgctgaatgtcatgttgcaattcaggctctgcgccgcgtggcgataacgctgttgccagccgccgaacatgcggtgctcttcgagaagttccaatgacaacgtcatctctgcctcctggcttattggtcgaagtggatgacggaacggatcgatttgccttcgtgcatcaaatcgaacgcttcgttgatctgctccagccccatggtgtgggtgataaagtcgttcagcgcgaattcgccgtccagataacgctcgacgatgccaggcagctgcgaacggcccttgacgccgccgaatgccgagccgcgccagacgcggccggtgaccagctggaatggccgggtcgagatctcttcgccggcgcccgcgacgccgatgatcaccgattccccccagcccttgtggcagcattccagcgcggaacgcatcacgttgacgttgccgatgcactcgaaggagaagtcgacaccgccgtcggtcagctcgacgatcacctcctgaatcggtttgtcatagtctttcgggttgatcagatcggtagcgcccagcttgcgcgccagatcgaacttgctggtgttgatgtcgatgccgatgatgcggcccgcaccggccatctgcgcgccgatgatcgccgacaggccgatgccgcccaggccgaagatcgccacggtgtcgcccggttgcactttggcggtgttgatcaccgcgcccatgccggtagtgacgccgcagcccagcaggcacacttcctccaacggcgcttccttgttgattttcgccagtgaaatttccggcaccacggtgtattcggagaaggtggaggtgcccatgtagtggaagatcggcttgccgtccttgaagaagcgggtggtgccgtccggcatcaggcctttgccctgagtggcgcggatcgcttggcacaggttggtcttgccggatttacagaatttgcactcgccgcactccggggtgtagagcgggatcacgtggtcgccgaccgccacgctggtcacgccttcaccgaccgcttccaccacgccgccgccctcgtggccgaggatcgccgggaacacgccttccggatctttgccggacagggtgtaggcgtcggtgtgacaaacgccggtggcgacgatccgcaccagcacttcgcctttttgcggtggcatcagatcgacttcttcgatcttcagcggctggttcgggccccaggcaacggcggcgcgggttttgatcatctccatcatagtctcctcagtggttttcttttaaatcaggcgatatcgctaacgtctgataaatcgttgggggtgctttcatcaacagcggcggtttccgtctgttcaataatcaattctttcagcgcgcgcacgttcggcccgaacgcgtcgcggcgccacagcagccaggtggcggtgtcggccacgtccggcggcagggtatgaacccgaacccgctcatggcccggcagcaggctgagcaccgaatgcgggatcatcgccagcccggcgccgctggcgacgcaggccagcatggcgtgataggactggatctccatgatctgccccggccgcgcgccttcgcgcttgaaccaggcctccagccgcaggcggtaagagcagctggcgcgaaaggcgaacagcgtctcgccgttggcgtctttggcgctgtggatcggcgcgtgatcgagacaggagatcaccaccatatgttcaggataggcgatacagccgttcaactcgtcataaggcaccgggccgtcgaccagcgccgccgccagcgtgccggcgcgcacccgatcggcgatttcgccggaggtgccggtggtcagcgacagtgaaacctgcgagaagcgctggtgataagccgccaacagcgagggcaggcgggtggcggcggtgctctccatcgagccgagggcgaagttgcccgccggttcgccggcgtgggtgatgctcatcgcctcgtcgctcagcgccaggatgcggttggcgtagcacagaaagttatggcccatcggcgacaggcgcaggcgctgtttttcgcggataaacagatcggcgcccagctcctgctcgagctggcgcagccgggtggtcagattcgacggcacgcggtgcagctgctcggcggcgcgggcgaccgagccggtttccgctacgcagcagaacatgcgaagctgggtcagatccataatgttctcgtttcgtgatgaacttgattagtattattcagtttttgtgagtttaatactgcggcatgatactggcaactttcttttaaccttttggatgccgatatggctttacgtattgccttgagcgggtttgccgcgctgatcgtggcgatgggcattggccgcttcgctttcacccctcaggtgccgctgatgatcgcggaacatcagttcagcctgaccggtgccgggctggtggcggcgatcaactatttgggctacctgtgcggcgcctacgacgcgatgcgcgccacgcgccacgtcgagcggcgcctgtggctgggcgtatggggcgcgatggcgctgacgctactgtcggcgctggcgcaggatgaatggacgcacggcgcgctgcgcttcgtcatcggctgggccagcggctgggcgatggtgctggtggcggcctggaccaacgagcggttggcacactacggccggccggcgctgagcgcagcggtgttcgccgggccgggcgccggcatcttcctcagcggcatgctggcggtgggcatcaacgcgctggggctgacggcggcgcaggcctggttggtgtatggcgggctggcgctggtgctggtcggggggattagcgcctttctgccgcgcagcggcgagctgcatcgcccggacgtggccccggagccgctgctgctgacgccggcgctcaaacgcctggtgtggagctacagcctggccggctttggctacatcctgccggcgaccttcttgtcgcagatggcggcggcgcgctttcccgccagcctgttcgcgcagttcgtctggccggtgttcggcggcgcggcggtgctggggattgtcatcggcattctgacccgccatcggctgaccacccagacccggctggcgatcacgctgtggatacaggcgctcggcgtactgagcgccgaagtggtgccgggcgtggccggcctggcgctcggggcgttgctgaccggcggcggtttcctttgcgtggtgcagcttgctcttcagcacgggcgtgagctggcgccgcgtcatgcgcgttacatggccggattgctgaccaccggttatgcgattggccaactggtcgggccgatgctgtcggcgctgtcgaccgccttgacccatcggctggagccggcgctgtatgtggcggtggcggcgctgttggcggccggagggctggtggtgaataccccggcgcggcggttggcgcaaaaaacggcgactcggtgattaaaaaccatacaaaaagcgtggagacccgcagccggcctgattgtgctaaatgcgaagatttcacctctggatgaagtactatcactggataatcgccgcgctctcatctacagtgggggcaaaatcttgaccgggttcacgttatccaccacgaaaactctgccgtcacgagagcaagcaattcgccggccgcacgccctatcaggccgctggcgggttccgtccgcaggagaacaaatacatgacatcattaagtaaagaagccgcgctggtgcatgcggcactggaagagcgtggtctggagacaccgctgcgcggggaagtgctggatcgcgaaacgcgcaagcgtcgcatcaaagagcacatgaccgaaatcatgcagctgctgaatctcgatctgtctgacgacagcctggcggaaacgccgcatcgcatcgccaaaatgtatgtcgacgagatcttctccgggctggactacgccaacttcccgaaaatcaccgtcatcgagaacaagatgaaggtggatgagatggtgacggtgcgcgatatcacgctgaccagcacctgtgaacaccacttcgtgaccatcgacggcaaggctaccgtggcctatatcccgaaagactcggtgatcggcctgtcgaagatcaaccgcatcgtgcagttcttctcccagcgtccgcaggtgcaagagcgcctgacccagcagatcctggtggcgctgcagaccctgctcggcaccaataacgtggcggtatcgatcgatgcggtccattattgtgtcaaggcgcgcggtatccgcgacgcgaccagcgccaccaccactacctcgctgggggggctgttcaagtccagccagaatacccgccaggagttcctgcgtgcggtgcgtcaccaccaggggtgatggcgttgcggggcgacccgcaagacgacaacaggcgcctgcgggcgcctttttcatgagcggaagacagcgataaaaaatgaacagtcatcctctgccgcgcattgccacgctggactgcgtgcgcggcatcgccatcctcggcattttattgctgaacatcagcgccttcggcttgccgaaggccgcctacctcaatccggcctatctggggatgccgtcatcgcgcgatgcctggacctgggcgctgctggatctcttcgcccaggccaagttcctggcgatgttcgcgctgctgttcggtgccgggctgcaaatgctgctgcggcgcggcaaaagctggatccgcgcgcggctgtcgtggctggtgttgttcggcctcgcgcacgccatcttcctgtgggacggtgacattctgctggcctacgggctgatcggcctggtgtgctggcgcatgatccgcgaggccaaagaaaccttccaactgctgaaaaccggcgtcgtgctgtacctgatcggcgtggcggtgctgctgctgctcggttttgtctcgcacggtgagccgggcagcttctggcagccgggcgtggcggagttgcagtacgagaagttttggaagctgcagggcggtttcgaagcctggcgcagccgcgccgatctgctctcgtccagcctgctggccatcggcgcgcagtatggctgggagctggcggggctgatgctgttcggcgccgggctgatgcgcagcggctggctgcgcggcagctattcctccggctattacctgcggcaggcggcgtggctgttgccgctgtccgtgctgatccaactgccggcggtggcgctgcaatggcaggtgcactgggactatcgctggagcggtttcctgctgcaggtgccgcgcgagctgggcgcgccgctgcaggcgatgggctatctggcgctgtgttacggtttctggcccgcgctgtcgcgcctgcgcatcgcccgctggctgagccaggtggggcgtatggcgttaagcaactacctgctgcaaacgctgatctgcaccacgctgttttatcgctttggcctctatgagcagtttgaccggctgcagctgttggcgtttgtgccgctggtctggttggtcaacctggtcttttccgcactgtggctgcgttacttcgaacaggggccgatggaatggctgtggcgcaaattgacgcagatggccgccggcgaagcggaatccaaagcgctgaagtgagcgcccgtcggcaggttaaaaaaatgtatgtaaacgttttctttcctgtgacgtaattcacgcagagcagcgggccaatcggggtaggatagcgccaccggccactaccccgatttcaggatcccgcatgcctccagttcatccgatcactattcgcgacgtggcgaaacgcgccggggtctccgtagcgaccgtctcccgcgtgctgaaccacagcgcgctgaccagcaaagagacgcgcgagcaggtgctgcaggcggtggcggatctgggctatcgccccaatgccaacgcgcaggcgttggcgacccaaagcagcgatacgttgggcgtggtggtgatggacgtgtccgatccgttcttcggcgcgctggtgaaagcggtagacacggtggcgcagaaacaccacaagtatctgctgatcggcaacagctatcatcaggcggacaaagagcgccacgcgatcgaagtgctgatccgccagcgctgtaacgccctgattgttcacgccaaagccctgagcgacgccgagctgatcggttttctggagcaggtgccgggcatggtgctgatcaaccggattatccccggctatgagccgcgctgcgtcgggctggataacgtctgcggcgcagaaatggcgatgcgtcttttgctgtcgcagggccaccggcgcatcggctatctgggctccaatcacccgatcgaagacgggccgctgcgccagcagggctatgcgcaggcgatggccgccgccgggctggccacgcccgacaactggcgtgcctacggttcgccggatctgcagggcggcgaggcggcgatggtcgagctgctggggcgcaacttacagctgagcgcggtgttcgcctacaacgacgccatggccgccggcgctatggcggtgttgaaagaaaacggtatcacggtgccgcagcatttctcgctgatcggcttcgacgacatccccatcgcgcgttacaccagccccaaactcaccacggtgcgctacccgatcgtctcgatggccacgctggcgaccgagctggcattgcagggcgcagcaggcctggcggagccgcaggccgctcatctgttcatgccgacgctggtgcggcgccattctgtcgccccctggcaaagtgaggcgacggtcactctctgacgatttaatcttgtgtaaccgttttcaatctgtgagaaaattcacagaatattaacatcgcgccgtctatgctctaggcgttttccggcgcaaaggcccttgccgctgcaacctttatctcgcgctgacacagcatttctcggaaataacaagatccacggacgacaggtgttgagtggaaatcgccaggcctggggtgtacgcactgccggtgaccattggctcaaagacgagtaataccctacacagaaccggagactgacaatgaataagaaggttttcaccctggccgccatggccgctgccatgatgtttggcgccgcagcccatgctgatacccgtattggcgtcacgatttataaatacgacgacaacttcatgtcggtggtgcgtaaggcgatcgagaaagacgccaaggcttcaccggacgttaccctgttgatgaatgactcgcagaacgaccagtccaagcagaacgatcagatcgacgtgctgctggccaagggcgtgaaagcgctggcgatcaacctggtcgacccggccgctgcgccggtggttatcgataaggcgcgcgcaaacgatatcccggtggtgttctacaacaaagaaccttcccgcaaggcgctggacagctatgacaaggcatattacgtcggcaccgactccaaagaatccggcgtgatccagggcgaactgatcgccaaacactggcaagccaacccggcctgggatctgaataaagacggccagatccagttcgtgctgctgaagggcgagccgggccacccggatgccgaagcgcgcaccacctacgtggtgaaaacgctgaacgaaaaaggcatcaagacccagcagctgcagatggataccgcgatgtgggataccgcgcaggcgaaagacaagatggatgcctggctctccggcccgaacgccaacaagatcgaagtggtgatcgccaacaacgacgccatggcgatgggcgcggtggaagcgctgaaagcgcacaacaagaccagtattccggtgttcggcgtcgatgcgttgcctgaagcgctggcgctggtgaaatccggcgcgatggcgggcacggtgctgaacgacgccgacaaccaggcgaaggccaccttcgagctggcgaaaaacctggcggcgggcaagccggccaccgaaggcacccaatataaaatcgaaaataaagtcgtgcgtattccttacgtcggcgtagataaagacaacctgtctcagtttgttaaataagaattgagatcccgctaagaccccgcctgcggcgccaacaccagggataccgccggcggggatgtttacgactgcaagatcgttaagccaggtgtatttatggccgatagctcacgcgaatttttgctggaaatgacggatatctgtaagtcatttcccggcgtcaaagccttggacaatgtcaatttacgcgtccgtccgcactcgattcacgccctgatgggggagaacggcgcggggaaatcgacgttgttgaaatgcctgttcggcatttacaaaaaagacagcggcagcattgtatttcagggccgggaaatcgatttcaagagctcgaaggaagcgctggaacacggcgtttcgatggtgcatcaggagctgaacctggtgctgcaacgcaccgtgatggacaacatgtggctggggcgctacccgaccaaaggcctgttcgtcgatcaggacaagatgttcaaagacactcaggcgatcttcgacgagctggatattgacatcaacccgcgcgaaaaggtgggcaacctgtcggtgtcgcagatgcagatgatcgagattgccaaggcgttctcctatgacgccaagatcgtcatcatggatgaaccgacctcttcgctgacggagaaagaggtcaatcacctgttcaccatcatccgcaagctgaaagagcgcggctgcggcatcgtctatatctcgcacaagatggaggagatcttccagctgtgcgacgagataacggtgctgcgcgacggccagtggatcgccacccagccgctggaagggctggatatggacaagatcatcgccatgatggtcggccgctcgctgagccagcgtttccccgacaggcagaatacgccgggtgaggtgatcctcgaggtgaagaacctgacatcgctgcgccagccttcgatccgcgatgtgtccttcgatctgcatcagggcgagatcctcggcatcgccgggctggtgggcgccaaacgcaccgatatcgtcgagacgctgttcggcattcgcgagaaggtggcgggcaccatcaagctgcacggcaaggcgatcgacaaccacagcgccaacgaagcgatcaaccacggctttgcgctggtgaccgaagagcggcgatccaccgggatttacgcctacctcgacgtgggtttcaactcgttgatctccaatatccgcaattataaaaacaagctcggcctgctggataacgcgcggatgaagagcgacacccaatgggtgatcgacgccatgcgggtgaaaacgccggggcatcacacccatatcggctcgctgtccggcggcaatcagcagaaggtgatcatcggccgctggctgctgacgcagccggagatcctgatgctggatgaaccgacgcgcggcattgacgtgggcgccaagttcgagatctatcagctgatgaccgagctggcgaaaaagggcaaggggatcattatcgtctcgtccgaaatgccggagcttttggggatcaccgaccgcattttggtgatgagcaacggccaggttgcgggcatcgttaataccaagcagacctcgcagaatgaaatcttacgtctcgcctccctgcacctttaaggattcgaattatgaacgcgctaaataaaaaaaccttatttacctatttcaaggaaggcggcatttacgtggtgttgctggtgctgttggccatcatcatcattcaggacccgactttcctcagcctgatgaacctgagcaatatcctgacgcagtcttcggtgcgcatcatcatcgcgctgggcgtggcggggctgatcgttacccagggcaccgacctgtccgccgggcggcaggtggggctggcagcggtggtggcggccacgctgctgcaatcgatggataacgtcaacaaggtgttccctcacatggaaacctggtcgattcccctggtcatcttgctggtgtgtgcggtcggcgcggtgatcggcctggttaacggcctgattatcgcctatctcaacgtgacgccgttcatcaccaccttgggcaccatgatcatcgtctacggcatcaactcgctgtattacgattcggtcggcgcgtcgccggtcgcgggctttgatccgaagttttccacctttgcccaaggcttcttgcgcttcggcgattttaagctgtcgtatattaccttctacgcgctgattgccatcattttcgtctggatcctgtggaccaagacccgcttcggcaagaacatcttcgccatcggcggcaacccggaagcggccaaggtgtccggggtcaacgtgccgctgaacctgatcatgatctatgcgctgtccggcgtgttctacgccttcggcggcctgctggaagcggggcgtatcggcagcgccaccaataaccttggctttatgtatgagctggacgccatcgccgcctgcgtggtggggggcgtatccttcgccggcggcgtgggtacggtgtggggcgtggtgacaggggtgatcatctttaccgtcatcaactacggcctgacctatatcggcatcaacccgtactggcagtacatcatcaagggcagcatcatcatcttcgccgtggcgctggactcgttgaaatacgccaagaagaagtagagctaccgcagcacagacgacaaggccggcaaaatatgccggcctttctttttggggcattacccgtcagggctgtttggctttctgcttctcttctttcagcttgtgctccagctcaaccaactgttccggcgagacggcgggatagccctgggcgtcttccggcacggtgtgcatggcggagatcgggatcagcgggccgaggaagcgcggttcacgcttgaggatgtacagatcggtcagcgcgcccaggcgggcgaagatctcgcgggcgcgcaccgtcatcatgtccttcggcgacggcaccgcgtaacactgcgcctgaatgcccatgtgcagggcgatgaacagcgcgcgctcgcagtggaagcgctgggtgatgatgatgaaatcgttggtgtcgaacaccttgcgggtgcgcacgatggaatccagggtgcggaagccggcgtagtccagcacgatatcgctcggcgccacgccggcggcgatcagatcgcgccgcatggtcatcggttcgttatagctttgctgggcgttgtcgccgctcagcagcaggtatttcaccttgccgctgttataggcgttgatcgctccctgaatgcggtaacggtaatactggttgatcacgccggtgcggtaatacttggcggtgccgagcaccacgccgacctggcgatgcggcaattcctgcagttcgtcgtagacgtaaggcgcggttttccaactgatccagcgatcgagcgcaatagccgaacccatcaacaccgcaatgatgatgaacaggctgatgatcaggcgtttccacatgttgttgccttacgcgcgccgggctgaaaaagatggatcaaggctactttacctgaccgaccgacgcaagacgcgaaccgcctgaagcacgcgcgccgccgcatttttcggcggttttgccgcacaaaaaagcccggcggagccgggctgggtcatttcagctcaccattcagaacgaggtgcgcttgtaactgcggtactgcggccgccagaagttgtgctcgatggctttcgacagcgcatcttcggaggtgacgatcgccaccccctgcagctgggcggctttacccacttccatggcgatgcacttcgacacaccctgaatatcgtcgatattcggcagcagcgcgccgtggccgtcggtagccagcggcgaacagtccgccagtgcgcggctggcggccatcagcatggcgtcggtgacgcgagtggcgccggaggccagcacgcccagaccgatccccgggaagatgtaggagttattgcactgggcgatcgggtacagctgctctttgtagcttaccggcgcgaacgggctgccggtcgccaccagggcggcgccgtcggtccagttgatgatgtcttccggacgggcttccacgcgcgaggtcgggttggacagcggcatcacgatagggcgttcgcagtgcttgtgcatctcgcggatcagctcttcggtaaacagccccggctgaccggacacgccgatcagaatggtcggcttggcgttgcgcaccacgtccagcagcgagatggcgtcgctggcggtttcccagccggccaggttgtcgctcttctgcaccagcttgctctggaagtcgagcaggttcggcagtttgtcggtcaacaggccgaagcggtcaaccatgaatacgcgggcgcgcgcttcgtcttcgctcaacccctcggacttcatctgcgcgatgatctgctcggcgatgccgcagccggcggaaccggcgccgaggaaggtgacggtctgatcgcgcagctggctgccggcggcgcggctggcggcgatcaggctgccgagggtgaccgcggcggtgccctgaatgtcgtcgttaaagcagcagatctcgtcgcggtagcggttcagcaacggggtggcgttattctgcgcgaagtcttcaaactgcagcagcacgttcggccagcggcgtttgaccgcctgaataaactcttcgacaaaggcgtggtactcctcgccggagatgcgcggatggcgccagcccatgtacagcggatcgttgaggcgctgcgggttgttggtgccgacgtccagcaccaccggcagcgtgtaggccgggctgatgccgccgcaggcggtgtacagcgacagcttgccaattggaatccccatgccgccgatgccctgatcgcccaggccgagaatgcgttcgccgtcggtcaccacgatcaccttgacgttctgcttggtggcgttttgcagcatgtcatcgatgcgatcgcggttcgggtaggagatgaacagcccgcgcgcgcggcggtagatatcggagaagtgttcgcaggcctcgccgacggtcggggtgtagatgatcggcatcatctcgctcaggtgcgagtccagcaggcgatagaacagggtttcgttggtgtcctggatgttgcgcagatagatgtgcttatcgttatcgttcttgaaatcctgatactgacggtaggcgcgttccacctgttcttcgatggtctccaccgcttccggcagcagaccgtgcaggttgaagtggctacgttcttcctcggtgaaagcgctgcctttgttcagcagcggaaattccagcagaatcgggccggcgtaagggatatagagcgggcgtttgctttcgtattctagttccatcagttttactcttcacgtatcagataactttattgccgacgatcctaagagataaagagaagatgtacagcatttgttgccagatgatgaaccaggttggcgtaattatcgacaatcaaatgattttttaactaaagaaagtgtctctggcggcgtcggggcattgtatttggcgggcggggctgttaacggcggaaccggatggccccgccgtggcgcttagaaggcggcgcggctgacgttctggcagcccagcgccgccagggtggcgcgggtggcgtcccactggctgaggatcgccttctgcggttcggccagcacagcgcggcgaatgttctggcagtcgccgccggagaggttcagcaggatcagcgcagcctgtagcggtggcaggctcgggttgaaagcggcgttttccgcatagcggccggcgtagaggctgccgtcctgcgtttccagcgctacgccgctgtgggcgttgctgtacggagcatggctctgattggccgccgccagcgccgcctgcgccagcgcatcgtccagcgccagccggtggccgtgatcgaccttgtccatcagcagcgaagcgatatccagatctttcgggccgaaggcgtccggcagatagtccgccagcgtggccggcgcgcggcccggcagacggatctgcagctcgccaccgctgttcagttcattcataaactggcggcaatggccgcacggcgtgtagttgacggtgaccgaggccagcgccggctcgccgcgcagccaggcatgggtaaccgcgcactgctctgcatgcacggtttgctgcagcggcgcgccgctgaactccatattggcgccgaaatagaggttgccgctttgcccgcgcgcgatggcgccgacgtgaaagtgcgatatcggggttaacgagcaggccgccgccagcggcagcagcgcgaatgccagcgcatcatcgtccagcccgcagcctgtgcggatcgccgccgcttgctcggccgtgaacatcgccggaaagtctggcgcgtccagataaggccgcagggcggattgcagtgtcgcgggcagtgcgctgaaagcggtgtgaaaacgcggatgcatagaaagtctctctacgggttaacgggataacattctaggcaggccagagacattaaagtgtgattaatgtctcttaattgatgaaattaatgcaatgaaatacataaatgcgagatgtatcgcaagtttcaccctgttcagccgaacaggcgcagcagcaccgggaacaggaacggtgccagcagcgaggtgatgatgccgcagatcaccaacgccagcgagccgaaagcgccttcctggtagtccatctcggcgcagcgtgcggtgcccagcgcgtgggatgccgtgcccatcgccaggccgcgcgccgagtgggtggtgattttcaacaggttgaacaacgtatggccgaacacggcgccgaggataccgacgaaaatgacgcagactgcgctgatcgccggaatgccgccgagcgagtccgcgacggccatggcgatcggcgtagtgaccgatttcggcaggatagaggcggcgatttccggcgtggcgcccagccacagggcgatggcgccgccgctgatcatggcggtcaggctgccgatgaagcacaccgcgataatcgacttccagcgcgcgcggatctggtgcagctgctcatagagcgggaaggccagcgcgacgaccgccggctgcagcagatcgttgaggattttgctgccctgaaagtagcgttcatagggaataccggtgagcagcagcagcgggatgatcaccgccatggacaccagcagcgggttgagcagcggcatattcagcttgcgcgccagccagcgcgcggcgaaatagaccgccagcgtcagcggcaacgaccaccagatttcatggatcatgaattgccctccgtgtcgtcgggcttgccggcgatgcggcgctcgcgatgaaaatagtgtgaggtatagccgaccaccaccaacaccatcagcgtgctgatgaggcaagagataaccagcgggcccagatgcgcgacgatctggtcgtagtatttcatcaccccgacgccgatcggcacgaacagcagcaccatatagcggatcagcaaatggcagccgggtttaacccatttggccggcataatctgggtagagagcagggcgaacagcagcagcatgccaatgatgctgccgggaatggcgaacggcagcagcgccgccaccgcgttgccgacgaacagacacaggtagataaggagcagggccctcaggtatttccagcacagtgtgagcacgttggccattgtcttttcccgtttaactgatgtattcatcatacaattaaactgtgagccatgccacagatcgcaccatgaattctcgctatgggtgctatgcccgagcggcgggttgacagcccgtataggccgctgcctgcgggatcagcgcgcgtcttcggccgttgccgcagaacgttccgccagccggtggccgaggaagaaaaacagcaggctgagcagggcggcgacgatcagcatcacgaacatcaacggcggcgcggcatagctgagcagcaccccgcacagcaccgggttgatggcgccgcccagcgcgctgaggttttgtactccatagtaactgcctttcaggtgcggcggcgcaataaagtcgatgaacatgtattccaccgggataacgatgatctcgcctaaggtaaacaccgccatcgccgccagccacagccagaccgcctggccggccgccatgaaaccgagcagcccgacgatgaaaaacagcgtgcccagcaccagccagcgcagcatgttttcctggcgcatgccgcggctgagcaggtattgcagggcgatgacgatgccggcgttgacgatcatcaccaacccaatgattttgtaggcgaactcggcgctggagacggtgatcagatactgcgacagatagccggtgaactgaccgaacaccacggcgcccagggtgctgccgagggtgaagtagataagccgccgatcgtttcgcaagatggtcagcgtctgacggaagttggggagtgccgccggtgcggcggcggttgttgtcgggcgctgttcccggccgcgcaagcgcaggcttagcgccgtcaccgtcgccagcgccaatccccccgacaggtaaaacggcagcagcgggctaagcccggccaccagaacgccgagcgcagagccgatcgcccagccgacgttgaccagcgtgtagttgattgagaaagccttgatgcgctgctcgaccggcagccagtcggcgaagcaggcctttatggtgatgcttaacaccgaataacaggtatgcaggatcgccagcaccacgatcacgccgccggggcgcgggatccagggaatggcgaagaaactcagcgcgaacaataaaatcgacagcaggatcagacggtttttgctgaatttgtcaaccagatagccgccgtacaggctggcaaggatgccgagggtcaggctgacgcccaggatcacgcccacgctcttcggcagcagatggaaatgttcggtgaggtagatggtgatgaacggcagcgtaacgccgcggccgatggtcaacaccagcgaactggccagcagtacgttgatcagcgaggggaatcccttcatttgaggcctgtttatgcatacagttattgggcgatgcagataacatagcgcattttggcggggacggaaggggaaagccgataattagtttaaaaacagaggctgcgtcggcagcctcgtcaaaaacagcattatttaccgtgttcggcctgcagcgtggcgaaccatggctgaacgaaatcgctgctggtgccccagccggggatgatcttcgccagcccggcgacgttgaccggccccggctgcgccagcagcagcgcctgcggaatgaccgctgctttgaactgatagctgtccggcgtgctttccccggcgatcttgttggccaccaggcgcaggttgaccgcgccgatcagcttcggatccaccgccacgctgacttgccatgggctgccggcctcgcgcatcagctgcaaatcctggttggagatatcgatgctgtacagtttgatttcggtgcggccgttctctttcaacgccttgtaagcgccctgggtgaaagcgtcccaggtgccccagatggcgtcaatcttgcctttcgggtatttcgccagcaccgcacccactttattggcggtatctccctgcacgtcggatgaaaccgcgccaatcgattccagctcatgaatgcccggatgctgtttcagcaactgctggtaagcggcctggcggcgctccatcggcgggaagcctgccacccagagtttgatgatgttggcctggccgttgaaatccttcaccaactggccgaacgaggcgttggccagcgaagcgtcgtcctgctgcgagacggtgacgccgggaacgcggccgctgacgtcggtatcgaaagccgcgacggcgatgccggccgccgcgatgcgcttgaccaggtcggtggaatagggagcccgcccctgcgagagaatgatgccgtcatatttctggctgatagcctggttgacgaagtcctgaaaacgcgcgtcgtcgccgttgctgaggaaggtgtccaccttgaagcccagcttgcgcccttcctgaatggcgcccgccaaaaattgcgtggtgttgtcgtcggatcctaggttgcggatcaccgcgatgcgcaccggcccctgatgttgagcgatggcggccggcacggcggcgttttccgccgcctgcagcggcagggcagccagcagactgagggcgagcagcgaagtcttgaggtttttcaatattataggctccaaaaaagcagggaaacgatcccggtgaaggtctgttatagcagtctttctgtctggacgtctattttgggtttcggagcatcatagccggatgcggcgggcaggggaatcagggcggttatgactttttcttcatgcttataacgtggggattggggcataaaaaaagggccgagcaagctcgaccctccctatgccacgcatctgcgcgattacttgacctgcatgccaggctgcgcgccgctgtccgggctcagcaggaagatctctttcccgccggggcccgccgccatcaccatgccttctgacacgccgaagcgcattttacgcggcgccaggttggcgaccatgatggtcagacggccttccagcgctttcggatccgggtaagcggagcgaatgccggagaagatttggcgcgattcgccgcccagatccagctgcagcttcagcagcttgtcggagccctcgacaaagtcggcgctcttgatcagggcgatacgcatgtcgaccttggcgaagtcgtcgaaggtgatggtttcctggatcggatcgtcagccagcgggccggtcaccggcttggcggcggccatgtcttccttcgaggcattgaccatctcgttgaccttgtccagatcgatgcggttgaacagcgctttgaacgcgttcacctgatggcccagcagcggctgcgggatcgcgtcccagctcagctcggcattgaggaacgcttcggcgcgctcggtcagcgaaggcagcaccggcttcaggtaagtcatcagcacgcggaacaggttgatgcccattgaacagatggcctgcagatcggcgtcgcggccttcttccttcgccactacccacggtgcctgctcatccacgtaacggttggccagatcggccagcgccatgatttcgcggatcgcgcggctgaactcgcggccggcgtaggcttcggcgatgctctgcgccgcgtcgacgaaggtctggtacagcgccggatcggccaggctgtcggccagcttgccgccgaagcgcttgttgataaagccggcgttgcgtgacgccaggttcaccaccttgttgacgatgtcggcgttcacgcgctgcacgaagtcttccagattgagatcgatgtcatcaatgcgtgaagagagcttggcggcgtagtaataacgcaggcagtcggcgtccagatgctgcaggtaggtgccggccttgatgaaggtgccgcgcgattttgacatcttggcgccgttcaccgtcacgtagccgtgcacgaacaggttggtcggtttgcggaagttgctgccttccagcatcgccggccagaacaggctgtggaagtagacgatgtccttgccgataaagtggtacagctcggtggtggagtctttgcgccagaactcgtcgaagttcagatcgccgcgcttgtcgcacaggttcttgaaggagcccatgtagccgatcggcgcgtccagccagacgtagaagtatttgcccggcgcatccgggatttcgaagccgaagtaaggcgcatcgcgggagatgtcccactgctgcagaccggattcgaaccactcctgcatcttgtttgccacctgctcttgcagcgcgccggagcgcgtccacgcctgcagcatttcgctgaaggccggcagatcgaagaagaagtgctccgagtcgcgcatcaccggcgtcgcgccggaaaccacggacttcggatcgatcagttccgtcgggctgtaggtggcgccgcacacttcgcagttgtcaccgtactgatccggcgatttgcatttagggcaggtgcctttcacgaaacggtccggcaggaacatgcctttctccggatcgtacagctgagaaatggtgcggttcttgataaacccgttttctttcaagcggctgtaaatcagggtggacagctcacggttttcatcgctatgggtcgaatgatagttgtcatagctgatgccaaagccggcgaaatcctgttggtgctcctggctcatctccgcgatcatttcttccggtttaacgcccagttgctgcgctttcagcatgatcggcgtgccgtgcgcgtcgtccgcgcagatgaaatgcacttcgtggccgcgcattcgttggtaacgcacccagatatccgcctggatgtgctcgagcatgtggccgagatggatggaaccatttgcgtacggtagcgcgcacgtcaccaataattttttcgcgacttgagccatagtgagaacttgctttctgtaatgaataaaagggccttcgatgttaaccgatcgcgcccttcgctgctagggcggtttcttacaggttatacgcgccagccgccgcgcagttctggtatgcttagccggaagctacccattcaaaatcaaggagccgggatgaacgcaaaatcccctgagcagaccaaccccgaagttctgcgcgccctggtgaccggtgtactggccgcctttgaacacccgacgttgaaaaacaacctgactgcgctgaaggctattcatcactgcgcattattggacgacgtactgcatatcgaactgacgatgccgtttgcctggcagagcggttttgaagcgctgcaggcgagcgtcggccctgagctgttgcgcgtgaccggcgccgccgccatcgactggaagctgaaacacgatatcacgacgctgaaacgcgccaacggccaagccgggatcaaaggcgtgcgcaacatcatcgccgtcagctccggcaaaggcggggtggggaaatccagcaccgccgtcaatctggcgctggcgctggccgccgaaggcgccaaggtcggtattctggacgccgacatttacggcccgtcgatccccaatatgctgggcaccgaacatgagcggccgacttcgccggacgggcagcacatggcgccgatcatggcgcacggcctggcgaccaactccatcggttatctggtgaccgacgacaacgccatggtgtggcgcggcccgatggccagcaaggcgctgatgcagctgctgcaggatactctgtggccggatctggattacctggtgctggacatgccgccgggtaccggcgacatccagctgacgctgtcgcagaacattccggtgaccggtgcgctggtagtcaccacgccacaggatatcgccctgctggatgccgccaagggcatcgtgatgttcgagaaagtgcatgtgccggtgctgggcatcgtggaaaacatgagcgtgcacatctgcagtaactgcggccaccatgaaccgatctttggcaccggcggcgccgagaagttggtgcagaaatataacagccgtctgctggggcagatgccgctgcatatctcgctgcgcgaagatctggatcgcggtacgccgacggtgatcagccgtccggagagcgaattcgccgacatgtatcgtcaactggccggccgtgtggcggcgcagatgtattggcagggcgaagcgatcccgacggagattgccttccgcgcgctgtaatctatttgcggcagtgaaagaacccggcttaagcgccgggtttttttatcggataggggtaggcttgtgcaggtcggcacgggtataagggcgttcgatctgcgccagcgttttggcgatatgctccagcaatccctgggtgggggccggctgccgctgccccatcagcgccaacggcaaggccagtgcgatggcgaagtgtggccaggagagatgcgggcgcgttttgttccgctgcaaccgcaggaacagggcgctggccaggtagcctaaaatcagcccgctgatcacctcggataccgagtgcacgcgaattaccagccgcgaaacgccgatggcgaaaggcaatatccacccggtcagcaaagcgatgctacgtatcgggtgggaaaatcggccggtcaacgtccagagcagtggcggccagatgcaggccgcgagggcggaatgaccgctgaatccggtgaaatcatagcgctcgctgccgatgccccagcccataaaggccagtttggacaggcagaccaccccgccggtgaacccgaagatcagcgcccactgccaacccgccgcgcgggtggcgggagacatgagcagcaataaaaacagaatcagcgcgcagggcagcagcaacatgctgtcgccgaaaaaagtcagaaaataccaatccagcacatcaatctccgatgaaagggggcggggagcaaaagtcagcgccggggagtgtaacccgttacggtgcgttgccctagctgcgagattcttaaaatgccgcgtggccgtggtgtggcagcccgaattcgcccgccgccgcgcaatatcaatatacagtggcgcaatccccggcgactccctataattgtcgcgttttagttcccccccttcacactatgaaatcaggtctttaattttatgactgacaatccgcatcagtgcgtcattattggtatagctggcgcatctgcctccggaaaaagccttatcgccagcacgttgtaccgcgaactccgcgagcaagtcggcgatgagcacatcggcgttattccagaagacagttactataaagaccagactcacctgaccatggaagaacgggtcaaaaccaactatgaccacccgagcgccatggatcacaacctgctgttccagcatctgcagatgctgaaggccggtaaggcgatcgagctgccgctgtacagctacaccgaacacacgcgcaagaaagaaaccgtccacctggaacctaaaaaagtgatcattctggaagggatcttgctgctgacggatatccgtttgcgccaggagatgaacttctcgatcttcgtcgacacgccgctggatatctgcctgatgcgccgcatgaagcgcgacgtcaacgagcgcggccgctcgatggattcggtgatggcgcaataccagaagaccgtgcgcccgatgttcctgcagtttatcgaaccttccaaacaatacgccgatatcatcgttccgcgcggcggcaaaaaccgcatcgcgatcgatattctgaaagccaaaatcagccaattctttgaataatgccgcttaatggccggaaatgcgcatttccggccgacggccaactatttgcaccccggcgtagacctttcgcccgttgtgtggcaatttttgtttagttacgcgttttgatggagaagaaagacatgagactgtgcgaccgcgatatagaagcctggctggatagcgagaaactggtgatttcgccgcgcccgccgctcgaacgcatcaacggggccacagtagatgtccgtttgggcaatcagttccgcgtgttccgcggccataccgcgccgtttatcgatctcagcgggccgaaagatgaagtcagcgccgcgctggatcgcgtgatgagcgacgagattgtcctgccggaaggcgaggcgttcttccttcatcccggcgaactggccctggcggtgacgttcgaatccgtgacgctgccgaacgatctcgtgggttggctcgacggccgttcttctctggcgcgtctggggctgatggtgcacgtgaccgcgcaccggatcgatccgggctggcacgggcgcatcgtgctggagttttacaactccggcaagctgccgctggcgctgcggccggggatgctgattggcgccttgagctttgagccgttgtccggcccggcggcccggccatataacagccggcaggacgcaaaatatcgcgatcagcagggcgcagtagccagtcgaatcgacaaggactaacggcgcgagatgcaccgtcggtgtggcgctgacaagagggtggcatgagaagattactgacgacattggcgattttactggtggtcgtggtggcgggaatgtccgcgctggtactgctggtcaatccgaatgattttcgcggttacatggtcaaaaaggtcgagcagaagagcggctaccagctaacgcttgaaggcgacctgcgttggcatatctggccgcagctcagtattttggccgggcgcatgacgctgaccgcgccgggcgccaagacgccggtggtgagcgcggaaaacatgcgccttgacgtcaaactgttgccgctgctgtcgcatcagctgtttgtgaaacaggtgatgttgaaaaatgccgtcattcgcctcacgcccgacagtgaagagcactcgcaagtggacgccccgattgcgccggccggcagcggcgctgatgcggcagacacggcctggaagttcgacatcgataacttgcgcgtcgtggacagcttgctgatttggcagcgcgccgacaacgcgcaaatcaatgtccgggacatcaatcttaccctgcagcaaacggagaaacggcaggcgcagctggacatttccagccgggtcaaccgcgatcagcgcgacctggccttcagcatggcggccgatatcgatctgcagcagttcccgcaccagatcggcgccaaggtgacccagttcaattaccaattggtgggagcagatattccgaacggcggtattcaaggcgaggggaatgctcaggtggtctatcaacagacgccggcgcacattgccgtcacccagctgaacgtcagcgccaataacagccagttgaccggcgatatcagcgccagcctgggagcggtgcccggctatgtggtgaacctgaattcggctaatctcgatctcgacgcgctttccggttggcaatccagcaccaataccgccgaacagcccgccgtgaccgccgcgccggtgatcgccagccaggtcgacgatcggcagcagaacctggaagcgctgcgcgatttcaatgcacagttgaatctgcaggcggcgcagttgacctaccgcggtatgaacgttacccagttagccgtcgcggcagataatcaacgcggcctgctgacgctgcataaacttgccgggcaattggccggcggtgatttctctttgccgggatcgctcgacgcacgcggcaataaaccggtgataaacgtgcagccgaccctgaaccaggttgagctcggcgcggtgctcaaagccttcgagatgccgcagatgctgaccggaaaattcagcatgaaaggggatttgaccggcgatcgtctttcttcagagtcatttgagcaccgttggagcggtacggcgcagctggcgatgcaggatgcgcagctgcacggcctgaacattcagcaattgatccaacaggcggtggcgcgtaacgataacagcgtgcgcgggcaagacagctatcagcgctataccgaagtcaaaagcgtctcggcgcgggccagcctgagccaaggcactgtcaagctcagcagcctgacggcggattcgccgttgctggcgctgaccggcgccggcagtatcgatatgccgggaaaacagtgcgatatggcgcttaatgtgcgcgtcactggcggttggcaagggcgcggcgaactgatcgagcaactgcaaaaaacgccgattccgctgcgggtctatgggccttggcaacagctgaattaccaactgcaggtcgatcaggtgctgcgtaaaacgctgcacgatcgggccaaagatgcgctgaacaaatgggctgaaaagaacaaggattcacgcgagggtcaggatctgaaaaagctgctcgacaagctgtaatccctcctgacgcgggccgtcttgcggcccgcgtcagtatcgacgtttcccgcgataatttccctccgttaccttgatgaaggtcatgaagacccgcgctcaatttgtgcagagtaagggcgcattctgctatgactatgcgcctgagcgcgaaaaaatgacgagttgaggaaacatgatagagcttcttattggcgcggcggtggcggcgggcgtgggccgttacatcatcaaagggtattccgccacgggcgtcttgatggtgggagggctgctgctgctaggcatcagcgccctgatgggaaaaacgctgttgccgtccggcgccgcatctaccggctggcgcgcgaccgatatgatcgagtacgtcaagattttgctgatgagccgcggcggcgatctgggcatgatgatcatgatgctgtgcggtttcgccgcctatatgacgcatatcggcgccaacgacgtggtcgtcaagctggcctcgcgcccattgcagatgatcaattcgccttatttgctgatggtggcggcctattttgtcgcttgcctgatgtcattggcggtctcttccgctaccgggctcggcgtattgctgatggcgacgctgttcccattgatggtgaacgttggcattagccgcggcgccgcggcggccatttgcgcttcgccggcggcgattatcctggcgccgacttccggcgacgtggtactggcagccaaggcggcggaaatgccgctggtggacttcgcgttcaaaaccacgctgcctatctcgattgccgccatcgtctgcatggccgtggcgcactttttctggcagcgttatctcgataagaagagtgatgaacagcaccacattatggacgtcagcgagatcaaaacccatgcgccggggttctacgcgatattgccgtttacgccgatcctcggcgtgctgatcttcgacggcaaatggggcccggagctgcacattattaccgtgctggtagggtgcatactgttggcggcagcgatcgagtttgtgcgcagcttcagcgccaaacaggtattcagcggcctggaagtggcgtatcgcggtatggcggacgctttcgccagcgtggtgatgctgttggtggccgcgggtgtcttcgcgcaagggttgagcaccgtcggctttatcagcggcttgatcgggttggcgcagtcgttcggtaccggcggtttgatcatgatgctggtgttggtggtgatcaccatgctggcggccatgaccaccggctccggcaatgcgccgttctatgcgtttgtcgaactgatcccgaaactggcggcacagatgggcgtgaatcctgcctatctggtgatcccgatgctgcaggcctcgaatctcggccgcacgctgtcgccggtctccggcgtggtggtggcggtctccggtatggcgaaaatctcgccgtttgatgtggtgaagcgtacttcagtgccggtaattgtcgggttggtggtggtgatcgtggcgacggagctgctggttccccagtaaaaggaaggccgggcgatgcccggcctcgatgttaaacctcgtactcctccggtggaggaggcggggtgatcttcactttcaggatgcggtggctgttgacctccaatggttcgaacaggtagtcaccgatcttgatctgttctccttcttgcggcacgcgctgactgtgttccatcaacagccccgccagcgtgtggtattcgcgcttgtcttccagcggcatcggcaggtacagcaccagatcttccagcggcatatagccgttggcgatccagctgccgtcttcgttttgctgaatgtcatggcgtgcgtccacctcttcgccggcctccggcaggttgccggcgatagtttccatcacgtccgtcagggtgacgacgccttcgacggagccgaactcatcgaccacgaaggcgaaatgcgtctgcgcctggcggaattgctccagggcgcttaacagcgtgagctgctccgggaagatcaacggttggcgtatcagcgcacgcagatccagcggcgcctgcgccagttgctgtttgagaacgtcgatggtgtggatcacgcccagcggttcgtcgctggcgctgctttccaccaccacgatgcgcgtgtgctgattacgttccagcaactgcgtcagcttttcctgcggatcgttcagctcaaggtattcgacgtcgtgacgcgaggtcatgatgctactgaccgtgcgctgcgccatgccgagtacgcgttcgatcatgcgccgctcttgctgattgaagatctcgccgttttcgctgtcgctgtccgccagcaggttggcggaatggctgtcgacttccgcttcttcatgtttgccgctcagcatgcgcagcaccgcttcggcggtgcgttcacgtagtggccgcaccttcgacagaaagcgacggcggttgaactgcgccagctggttcagcgcttcgatcatgaccgagaagccgatcgccgcgtagaggtagcctttaggaatgtgatagccgaagccctccgccaccaggctaaagccaatcatcagcaggaagctcaggcacaggataacgatagtcgggtgcgcgttgacgaagcgcgtcagcggtttgctggccagcagcatcaggccgatggcgatacagaccgcgatcatcatcaccgccaggtgatcgaccatccccaccgcggtgatcaccgagtcgagcgagaaaacggcgtccagcaccacgatctgcgccacgaccggccagaaacgtgcgcctttgcgcgcgccgtgctgctcttcgtccttgccttccagccgctcattgagctccatggtggctttgaacagcaggaatatcccgccgaccaacatgatcagatcgcggccgctgaaggggtgctccgcgacgatgaacatcggtttggtcagcgtcgccagccacgagatggaggcgagcagcgccagacgcatgaccagcgccagcaacaaaccgacgacacgggccttatctctttgttgttttggtaatttgtccgccagaatggcgatgaagacaaggttgtctatacccagcacgatttccagcacgaccaaagtggccaggccggcccaaattgttggatcagcgatccattccatacgcccaatttcacctgtaagttctacggcttatgccgcacgggaatgatgggcgttgaggcggcaaaattcaactttaatcgggaggatgtggttcagaacaggaggattgccgtaaacatcgatcggcgccgagcggccaaaggaatcaagggcctggggagcaaatatctaccgggatgccatacgctcagaaaagaaacgccttattaaatttatttaaatcaaaacattaaaacaattttctttggctatgattcttatcggtatgtggcacgagtagtcttattctgaaaacggctgactggggggatctaaggcttgtatcacttagacattagtataagaatcttagtcatataacggcagtaactaacattgtttggttataaaggcaccgttttttttatttttttgtgaacagcatgacagttcaaacgaagaatgagtgccgctttgcataaaaattgcctggctcatgcaatgacgtggggggatacgccattaacagtactttggtagctgcaagccaagggcggtagcgtgcccgattgaatccccttgttcacgctgcacagatgaatgcagcgctacgatgaattggaatgaaaatgcaaacaagacttaaggcagtgatccccgttgcgggcctgggaacccgtatgttgccggcgaccaaggctatccctaaagaaatgttgcccgtggtcgataagcccttaatccagtatattgttgctgaatgcgtggcggcagggattaaagatatcgtattggtcacgcattcatcaaagaatgcgattgaaaaccattttgacacttcgtttgagctggaggcgatgcttgaagcgcgcgtgaagcgccagctcctggctgaagtgcaaagcatttgtccgccggatgtcaccgtgatgcaggtgcgtcaaggacaggcgaaagggctggggcatgcggtgctttgcgccaaaccaatggtgggtgattctcctttcgtggtgctgcttccggatgttttgctggatgatgcaacggcggatttacgcacagaaaatctggccaagatgcttcagcgtttcgacgagacgggatacagtcagattatggttgaacctgtgccggaacaagatgtgtccaaatacggtgtggtagattgcgcaggcgcgacgatcgcagcgggagaaagcgcaccgatgacggcggtggttgagaagccggcccgcgaggatgccccttccaacctggccgtcgtcggccggtatgtgcttgccgccgatatttggccgctacttgagaaaacccctcccggcgcgggtgatgagattcaactgaccgatgcgattgcgatgctgatggatgaacaaacggtggaagcgttccatatgagcggtaagtcccatgattgcggtgacaagcttggctatatgaaggcgtttgtgcagtatggggtgcgtcacggttccgaaggcgaaaacttcacccgctggttgaagcagacgttgggaaagtaacaggctgtcgccactgcggctgaaagcgatcacgagattgaatgaggtctaccatgacgaagttgaaagcggttattcccgttgccggattaggcatgcgtatgctgccggcgaccaaagcgattccgaaagagatgttgccaatcgttgataaaccgttgattcaatacattgtcaacgaatgcgtcgcggcggggattaaagagatcatcctggtgacgcattcttccaagaacgccattgaaaaccatttcgatacctcattcgagctggaggcgatgctggaggcacgcgtgaaacggcaactgctggatgaggtacagtcgataacgccaaaaggcgtaacgctgatgcacattcgccaggggcaaccaaaaggactgggacatgccgttctctgcgctaaaccgttggtcggtgattctccgtttgtcgttctgttgccggacatcttgctggatgatgcaaaagccgatttgaagaaagacaacctgtcacacatgattgcgcgctttgagcagaccggtctgagccaggttttggtgcaaaaggcagacgaacacgtgctgcatgattattccgtggttgagtgtgaggccagcaacctgaaacctggcgaaagtgcccgtatcacatcgattattgaaaaaccggcgccggaaaccaagttggaatccaactactctgcggtagggcgctatgtcttgtccgccgatatttggccgctgctggagaccacggaaccgggagcctgggggcgtattcaactgaccgatgcgattgcagaattgttgaaacgcaaaccggtagaggcgacagagctggtgggtgaatcgttcaactgcggtgaaaaactgggctaccttcgcgcttttgtcacttatgggttgcgtcacccaacccaaggcaaagctttccgtgaatgggctgaacggctagcgttttgaacaagactggatggtttcccaccggcccgaacacggcgagtaagtcaggatagtggttgaattttggggaatttcactgtctcattttttatattagtatacattcaatagcgggttgctgagttgccttggcgagtgatttttgttcgagcttgccaagctgctctgcaacatactgttattaatacaaattaaagccctaatcggccccggtatcgatttttcgccaatgcgaggcttctcagcttatttagcttaccaataatagctttgctcttatcaacggcagataaacgttatggaaaattgcaacagggcgcttattgagagacgacgcagcaagtgtcaggcattttgataaggttacagcgacgcagccacggttggctagcattgtagctttgcagatacatttacttgaaagtgatgataatttgatggcaaaacgacaattgaaagtgatatcgctattgatatcaatcagcgtaatcagtgggtgcacggtgtttcctggtcaacatttgaacactgtggggaaaaatactgtaaaacaggaagatagcgacttcaatattgatgacttggttaatgtttatcctgttacacccaagttaatccagaaattacgtcctaccaaagtggttgctcagcccaattcatcgctggaagcctccttgcgcaattacgagtatcgaattggcgttggcgatgtattaaacgttactgtttgggaccaccctgaactgactacgccggcagggcagtatcgcagcgccagtgataccggtaactgggttcaatctgatggcactattttttacccatatataggcaaagtgaaagttgtcggcaaaacagttggccaggtacgttcggaaataagcggccgcttggcgcagtatatcgaaagtcctcaggttgacgtcaatatcgcggctttccgttcacagaaaacgtatgtgaccggggaagtcaagacatcggggcaacaaccgatcactaacgtgccattaactgttctggatgccattaacgctgcaggagggctcagtgagaacgcggattggcgtaatatcgttctgacgcatgatggcaaagagcagcgtctctccttacagcaactgatgcagaacggtgacttgacccagaataggttgttgtatccaggcgatattctttacgtgccacggaatgatgacctaaaagtattcgtcatgggggaagttaaaaccccttcaacgctgaaaatggatcgtagtggtatgacgctgaccgaggccttagggaatactgaggggatcagccaaaccgctgctgacgcgacgggggtattcgttattcgccctcttcacggttcccaaggcaacaagctggcggatatatatcagttgaatatggctgatgcgacagcgatggttatggggtcagagttccacctacaaccttacgatattgtttatgtcactgcggcacctatcgttcgctggaatcgcgtaatgagccaactggccccgacgatagccagcttcaatgatcttacagaaggcgcgctgcgcgttcgtaattggccataggaatgaacgatgtttgattcaatcttggttgtttgcgtaggtaatatttgccgttctccaacgggagagcgattattgcagcgattggcgcatggaaaaaaaatagcctcagcaggaattggagctcttgtcggtaaacctgctgattctgtagctgttgaagtggctaatcagcataatttatcgcttgacggccatattgctacacaattaaccaaagaaatgtgccgagaatattcgcttatattagttatggaaaaagggcatattgatgctgtatgtcgtttggctcccgaagtaaggggtaaaacgatgctgtttgcccattggcttgggcagcgggaaattccagatccgtatggtaaaagccatgaggcttttgaatttgtataccgcttacttgctgatggcgctgaaaaatgggcgcaggcattaaatcgttaatcagagattacaatgactgaaaatacaaagatgaatactgctgcaaataatagcaatgatgagatcgatttaggtcgattgttaggtacattattagatcatcgttggttgattattggtgtaactgcattgtttgcggtagtcggggttgtgtattctctatttgcgaccccggtatatcaatctgacgcgttagtccaagtagaacagaacgctggtaattcgttactcaacaatcttacagaaatgttaccttccagccaaccaggttcctcgacagaaatcgaactgattcagtcgagattggtgacgggtaagacaattgatgatttgaatctagatacggttattgaacaaaagtattttccagttttcggccagggttgggcccgtttgatgggagaggtacctggagaaatagccttatcacgccttacgatacctgagtcatggaaaagtatcccattagaccttaaagtcactagtgataacacttatagcttaagtaatgatggggttgaaatattaaaaggaaaagttggtgagcttgcaagtggtaatggcgtatccctgctaattagtgggcttggtgccaagattggcactgagtttacaattgtacagcaaccaaagttggttgctattaatgatttgctcgcggttctgtcggtccaggataaaggaaaagatacgggggtattggcacttagtttgactggggccgacccaatattggtgcgtaaaaccctcgatagcatcactcgcaattatttactgcaaaacgttgagcgtaagtcggaagaagcagcaaaaagcttagagtttttaaaagaacaactccctgaagttcgtggagcattagatcttgcagaggataagctcaatcgttttaggcagcaaaatgattctgtcgacttatcgcttgaagctaaatctgtgctggacagtattgttgcggtagaagcacaattaaacgagttaacttttcgtgaagcagaaatttcaaagctgtatacccgtgaacaccctgcctaccgggctttgatggaaaaacgcgctacgcttgagcaagagaaaaatcgtctaaataagcgtgtaggaggtatgccaaaaacgcagcaagaaatcattcgtttaactagagatgtagatgctggcaaagaaatttacatgcaattactgaataaacagcaggagttaagcattaccaaagcaagtactgtaggtaatgtccgtattgtggatcctgcggttacacagccaaagcccgttaaacccagaaaattgcttattattttgttggcgacgttcttggggggaatgatttcagttgctattgtcttgttgaagacaatgttgcacaaaggaattgaaactccagagcagctagagcaagatggaattaacgtatatgcgagcattcctctttcagaatggcaacagaaaaaagatcgggagacgttgttatcttcaaaacgtaaatcaaatacacgttctaatagtctcttagctgtaggcaatccggccgacttggctattgaggctatccgaagcttgagaaccagtttgcactttgccatgttagagtcaaaaaataatgtactaatgatttctggtgcaagtccgaatattggtaaaacttttgtcagtataaatttagctgctgttattgcacaggccggacagcgtgtattagtaattgatgctgatatgcgtaaaggctattcacacaccttgttaggcgtaggttggcagaatggtctgtcagacatattgtcgcagcagacaacattcgaggaatcgattcgtaaaacagaaattgaaggtatggactttatccctcgtgggcaggttccacccaatccttctgagctattaatgcgaattcgtctcaaagagttaattgactgggcaagcaagaaatatgatatcgtattagtcgatacaccaccaatcttggcggtaactgatgctgctattattggccaccatgcaggaaccgctctcatgattgctcgcttcagcatgaatactgtgaaagaaatagagatcagtatgcggcgctttgaacagaatggcattgatattaaaggtgttatactgaatgcggtggagcgcagagcgagtagctattatggcggatatggctactatcaatatgagtaccgctcgaatgataaggcatagtcagcaccatatataattatgatgtcaggtgggattaagtcccacctgatatttttttaggaaaaaataaatcgttatctatagattagttatcttgtaaagaatattaaatacgggtgattagattatattttttcatgaaaaggtatttcgataatataaataatgctcttgtaatgctttataaaacgtaaactcttcccaaatgaaaatttacaagtacactttatttttggtcaaaaaataatgaaaatactaatagtcaatacaatatatgcaccatttaaagtcggtggagccgaggtttctgtacaactattagccgaggagttggtgaaaaatggacattcagtacttgtagtgactttgcatgataaggcgaataaagagaaggcgactataaatggtgtgaatgttcattacttgccacttaaaaatatttattggccattttccaacgatggtgagaaaaggaagaagtgggaaaaaatcgcttggcatattatcgataattataatttcaaaatggcaagattattttctgaggagcttgacagttttaaacccgatatagttcacactaataatatttgtggtttttcagtttcaatttggaaagagatcaaaaaaagagatattaaacttatccatacttctcgagattattatctttttcatccaagttctacattatattccagaaataaaaatataaatgtcaatgcactatctgttaagttgtggtccttttttaaacgttcagccagccacagagttgatacctatgttggcataagtgattttattaaaacgtttcacatcaacaatggtttcttcaaaagagatagcgctttttatatctataacgcggtgaatagacctgactatcaatcggacaaagggaataagactcgttttggattcatcggtcgattgacaagagataaagggtttgatgactactgcgagtttgcgagtaacaaccccgatgctgtttactatgcagccggtcgctttccgagtggcaaagaaggggatgaactaaaaagattggcagagaaaagtaatattaaattaatgggttttatatctattgatgagtttttctctcaggttgatgtggcctttttaccagtaaaatggcgagagccgtttggaagggtggtagttgaatgtgtatttgctaacaaaatagtgttgacaaatgcggttggtggtatttctgaattggctatgcttctcccaaacatttactttattgataaaggaaaggatgtgattgcagggtgtgctgtgaatgaagttacgaacgagcaacttacgatgttcagtcaggataaaataaccttagagtatctttcagtttatcttcacaccataagaaatggttctgttaattagtgatgaaacttatcgctaccaatttttgaaatatattggggtgctagatggactttcttatattacaagattcaatagttttctttttattcctagctattgcgcttatatattttctcattgttgccaaaaaaaatggcttcaatatatatacaataattttattttctatttatataatatgctcttactcatcatataatattatggtgaaaccgatacatgacttcaacatagcgataccacgaacggggatttatcatttcaaagttatcgggccattagctccgattgatattatattcttgctgctttttgctttcgtttttatgaaaaaaataatgacaaaaagcttgtttagttatcagattgtaaaaaactcggcggtaatatcaaaatatataactctccagggcgttctgttggctataatttccagcatgggatttgttgcctatattaaaaatggagggcaaggtgaggtaaacgatcaactaatttattgtagaggggtcatatattttctggtttcaatatttttatttcaaaaatcatgtgaaaatttgaaaggttttgatttttataaattgttcaaaatcttttgtgtcattgatgtgcttaatttaatgtccggttttatttccagcataatttttcatgactatgtatgggaacggtatggtgtaaaaataacaattattgatcaagataaggccacagcatattttgttatctacgcattgcttataacttcacttttattcaccaggccattaaaaaacaaagtgatttacatatcgaccctgcttattggcatttttatgttttacaatatgtacaaatttgttttctccttggcatttctctatattatttatgaattcttcatcaacgcaattcgaggtcgaatagcggtggtgaaaatgtcgctactaacagtaggcctagttgcagtaatgtctacagtattgatgctttcaaatagtaaggcaatgaatacgcgttcaacacaatttggtgactactgggagtatacaggtagtaaatttcctgctattgcattgggaattggctttggtgggcaatactattcgccatcagatactgatgatcagggggagataaagcaaatcgacgttgagaatggaactgctaactaccgtaaaagcatacaaactccgttcttgaatcaaatcaaaaatgcgggcttgataggtttcttcataactattttctttgctatctttgctgtcatatatatggctaagattaatatctccttacctgttaatattctttataacgctatatgctttaatataatgtggtttatgtgtagtggcagcattatgcttcaaccgacaccaatagcaatagttactgtctccaagttattattgttgttctacttgttgcgagaaagagaaaaaaacaataatgccacagttaaagtttagccattattacaaatggggtttttatgctttacataaatggtaggttcttgactcaagaaatgactggtgtgcagcgttttgctgaggaaataactcgccagttgaataaagtaagagatgatgtggtggttctagcgccagaaggcgttttgaataagtcattatttagtgagtttaatattgaggttgtacaaggaaaaaaaggtcattactgggagcaaatcgatctccctcgagctctaaggaaaaaaggtgggcccttattattgaatttgtgcagtaccgcccccgctttttataagaatcaaattgtcactcatcatgatgtgacatacaaacgctaccctgatagtttttctaagaaatttagatttgtatatggtcttcttgttccgataatgttgaagaatagtcgacatttgcttactgtcagtgagttttctaagagggaaattcatgatttctttggctaccctacggagaatatctcagttatttataatgcggtaaataactcattttcaaagacagaagagaaagatataacgaggggtgattacttgcttgctgtctcctctcctaattaccataaaaatttccatggtatgctatcggcatttgaatctgtatcagagaagtatgaaatatcacttaaaataattgggaaaacggcggtgagcttttctcaacaggatttctcaaaactgatatccaatactgataaagtggaatttatggggagggtcgacgataaaacccttatacagctttatcaaaatgcggtggcttttgtttttccatcatattatgaagggtttggaattccaccgttagaggctcaatcttgtggttgtccagttatatcatcaaatgctgcatctatgcctgaagttttgcaggatagcgtgatatatttcgatccgaataatacggaagcgatttctgatgccatgataaaaataatcactgacaataaattgagggctgagctctcgcgaaaaggtaatgataacgtgaaacgtttttcttggcattcctcggcggagaagattagtaaaatagttgatgattttcaaaatgacgggttgtcatctaaatgaaagtattacatgcagcggaaacaataaaaggtggcgttgccactgtaatgcgccaacttgtggcagggcagattaacgacgaatctattgatgttagatgcattgttccttctgagcaagtgtctgaattgggtgtaggtaaagaaaacatcatcgttttctctcgctctggcagagatatttattcattttttattttcttccttacattcactaaaactattatttcgtttaaaccggacttggtacatcttcatagtacattctctggttttatggggagggttgcgctttatttattgtggccattttaccgacccaaagtaatttattgccctcatgctttttcatttatgatgaagggtggggcaaaaaaattaaaactgtatgcagcacttgagcgtgctctttcgcctatcacagatgtcattatttgtgtgagccagtatgagaaaagctgcgcaattgaatacggcttatcagaaagaaaactgaaagttgttcataatggtgttccggataaactaccatctggaccaactgctaatccctttgagcctgatgtgattaatgctattttcgttggaaggtttgattatcagaaggggttcgatattttgcttgacgccatgaccagagttaagggggaagcaatttttttgactgccatcggtagtgctgttcatggcaaggataatccaagagaaatgatgcaaacatcatatacgggatggctcagcagtgatgagttagcaccgtatcttattaatgcagatgtattagtaatgcctagtcgctgggagggcttcgctatggtagcgttagaagcaatgagctatggcctgcctgtgttagcgagcaattgtagttcatttcctgaaatgattgaagatggccatactggaattctattcgaggctgaaaactcaaaagatttggctaattatcttaggaatacatctaaagatcagtgggctaaaatgggagagaatgctagaaaggtttttctcaaaaactatacctcagtgaaaatgtgtagagatacgctatctatctacaactctttggctgctgagacgcagcgataaatgttctattggatatgatttatttatttttctgtgtgagtaaaagtataagtcaactctatgctaattacttttttggtgtgctgacacttttaaaatgttatggatgtcaacttcatgaaagaaaattataactcttcgctatttcataaaataatattccttgggcgaatctcatgagtatggaaaaagggtctatggcaaattatattactaagttatctttggcattgtctgatatttttttatttaatgtttcagtatatctttcctaccttattatttataatgtttttggtggcatagaggagttcattccgaaagatgaatttgctgttagggctgcagctcaatttattctttctgttttgtgtgttatttggttttggactagactccgtcattatacatatagaaaaccattttggtttgagctaaaagaaatcgtcagaacactcattatttttgctattttagatttggcgctagttgctttctcaaaatggaatttctcacgttatgtatggattatatcttgggcgttgattatttttcttgttcctttaggcagatcattaacaaaaagaatgcttaacaagttcaacctctggaagaagcacacaataataatcggtactggaaaaaacgcatttgaagcttacgctgcactacaaagtgaagaggttctcgggttcgaggttgcagcctttgtatgctcagatgactcttgtgctgaaaacaaatttaacattcctattattagggatgagcgagagctatggaagtgttctgatgttgagagcactcaattcattattgcgcttgaatttgagcagcatgcattacgggattggtggttaaagaatttggtgaaacataattgccgttcagtttctgtcattccaacactacgaggtgttccattatatgggactgatatgtcattcatctttagccatgaagtgatgatcttgcgtgtcagtaataatcttgctaagcgttcatcaaggttgttaaagagggtgtttgatatagtaggatctctttctattatcgttgccttaatgcctatattgatttttttggcttacaaagtatcgcgagacggtgggaaggcaatctatggacatgagcgcattggatataatggaaagaagtttaagtgcttaaaatttcgttcaatggtaactaactcacaagaggtcctcagtgagttacttgaaagagatccagcggctcgcgaggagtggaacaaggattttaaactcaaaaatgatcctcgaattactaaaattggtgcgtttatacgtaaaactagccttgatgaattaccacaactctggaatgtcttagtaggtgaaatgagcttggttggcccaagacctgttgtagaggctgagcttgaacgatatgcaggtgatgttgactattatcttatggctaagcctggcatgacgggattatggcaagtcagtgggcgcaatgatattgattatgatactcgtgtttatttcgatgcttggtatgtaaaaaattgggctctatggaacgatatcgctatcttgtttaaaactatttcagttgttttgaaacgggatggagcttattaacttttgagtgttggatgataaggggggaggatggagaggcgagaacttgtaaaaagcatgctgcttgcggcggctggtgcttctgtagctggtatatcttcaagtgctgaaagcagtggtgaggccacttctaactctgtaggttttgataagctgcgccctggctcatttaagaatgatggggctaaaacgataaagttaagccccgaaatgttttttaatgggaggagtttggatagcaccaatcaatcgctgacagaagttaatatgcagatacagcgagatagctatgatagttttgataaaatgctacagcaagctagagttctctcatcgaataatatcgttgaaattacattgggagggtattatagagtaagtaaaggtaacttcgagttgccatccaattgtcatattatcggaggagggacagtatttttagataatgaggaaagtgatcaggctgtttttaaggttgagaataaacagaactttattttaaaggacatcacaatatcttcatcaaaaaccaccgatttgtgggggaaaacatgcaatggcattgaaattagagggtgttcaaattttgaacttagcggtttaaacataagctaccgtacagatgcaatatcaatatcagattcatctcattttagagtggagaattgtcttgttcataagttaggcgaagagggaattgctattcgtgcctgcttctcatggcttgtttttaacaatgacatatatgagcataatggtgacggtatccttctgaaaacaagtgggtccccatcatatgatgggaaaatcatttgtaataggatattttccgctacagatgcctttggtttaaaaggaactctggggggaggtattactcttaacgatgagaaaactggatccagtactacttttagcaatcttttagtgagcggtaactctattagtaatacctcttatggtattgcttttactaatattcaaaatctgaaagtagttgcaaatgatattgatacggtagttcgatttggcattatcgtcgataatgcccttcacaataacccacagcaatacccaattaaaaaaacgattgtctctggcaatacggtgaaaaatacgggccaagccggggtggcattctttagtgcaaatggtatcgatgttcagaataccattatatctgataatattttagaaaggtgtgggttgcaagagagtggagattatccagctatttcttctactaatgcgacaatatcagctaatcgtattagcgatagccgtactttacttaacgctatggatagcatcattaatgctaacttttttggaagcagtttaaaaaaaacagcaggtgaaaacattgctgattttaagctcggaggctccataaattttataggtaatatcattgaaaataaagggatggggcatattcggcttttagatatttccaatctggtttttattggaaatcaagtggagctaagctcgtcattctctgttttccatctggcatcggcaccttcaggagcagtattgattaaaaataatcatattcaatcacccgctacgaatgttttcactggtatgatgacagcagcacatatggttgatacggatttttcttcgtttggaaataaagtgtgtttatttggtgttcccaaatatggtgagtttaaagccggtgatagagccatacagcgctgtcctgaaccaggtatgccctctgaatgggtatgcattgaaagtggttcaccgggtatttggagtattgagaagtttgccaacataagttgtcgcagtactcctcaaaaaatcaatttggctcctagtgaaaaagcaatcatcaaaagtgtcgctttaggtgctaagtctgggtgggcgatcaattcgttagggtgttcactacctctgatgcaagcctcgctgaatgcttctttagatgaagatggtgttgttaccattacagtaagaaatattggtgatgctcacttgaatgtagaaaaagtcattttcaatgttgtgatcaatagggggtattagtcgtggtgagttcttgtttttatgaactgaagacacttagcccattttactttcgctttacttctcctttggtgtctgtatttttctgcattccttctacttgcatttctatctttacttcatagtaattactctttttattccatgatctattggagtttcctggttgattttttgtatgagcatatttagggatgcacacatatatatcttggtaaaccgtaccatgcatatttagatgtcttccgacatgctgattatgtcccttgaggagttcaccatgcttacccctccgatacgtcgaacacaagagcatcgccgttttttattctatcagacccggtatttctgcactcagttattacaagctgaaagctaagttcgtcggtatcgaatcctttgatatcaaaaatatgaaagatatctagggcgaaaaccgtcagttgaaacagatgttttcgaacctgagcttcgagaacctcatactgaaaatgtattatttgttaaaaacgttgaaataagtgataaagcgtggattttaaaatttttcaggtgattagcatgccgaggcgtccctggaaccatggaagcgttcatcatatctaccatctaccatctaccatctaccatctaccatctaccatctaccatctaccatctaccatctaccatctaccatctaccatctaccatctaccatctaccatctaccatctaccatctaccatctaccatctaccatctaccatctaccatctaccatctaccatctaccatctaccatctaccatctaccatctaccatctaccatctaccatctaccatctaccatctaccatctaccatctaccatctaccatctaccatctaccatctaccatctaccatctaccatctaccatctaccatctaccatctaccatctaccatctaccatctaccatctaccatctaccatctaccatctgccatctgccatctgccatctgccatctgccatctgccatctgccatctgccatctgccatctaccatctaccatctaccatctaccatctaccatctaccatctaccatctaccatctaccatctaccatctaccatctaccatctaccatctaccatctaccatctaccatctaccatctaccatctaccatctaccatctaccatctaccatctaccatctaccatctaccatctaccatctaccatctaccatctaccatctaccatctaccatctaccatctaccatctaccatctaccatctaccatctaccatctgccatctgccatctgccatctgccatctgccatctgccatctgccatctgccatctgccatctgccatctgcttaagctctatttttgcctcattggtaaacaacatctaccggtgcgtaattccgtactgcacgcgacctttcatcatcgaaccagacctgtcccatcgattttatgcatgatgtgctgaccgcggcagacgattccggactttcgacgtgatggatagttttaaccgtgaagtactggcaatagaaattctcctgaatggtccgaaaacgaggcaagtagccgcgaatagcgatacttgttcatgactctgagtgaagcacgctaatcacaacgcgctggtttacgaaataaaacactgagcagcctcattaatccctgagtaacccggcataggaaaagtactggctgatggtgaaaagtccgtaaattacaaaaagttcgtaaaactaaaccggtatgtttacttacttgcttaatgcacttaacaatagtttcgggttttgtgagagccaacaccatgttacgtatttaaactaaaatcaactgtgcaagtgatatccgttcaggtttcttactcgaggctcaatgataaccttggctccagagtgggtatgttatggcttaattgtatgatgtttaaaggaagtcctattttatttgcttttgtatttaattatatatttgttttttatgtgattttaatttggttctgaccttccctttgattttcttgtgtaagtggcctgacttggtgattttgggtggtttttaattttaatttttaaaatccattaaaattcaacctgatgtgatttttttatatttaaataaaaaaaatcctactccttgacaagggtctgtttatggcctttctttagtatgtgtcgctatggttctgtacggttagggggtaaagcaatctttaagttagttagagtattagtagttatgaggttcttataacttcctgtttccctcatcttcttgattaataaagggacaggttttgcttaatcaaaaatctacctcgaaggaggtttttatggcttctctggcgtttcaaaaagaggcggctgcagttatgtatgccgttctggggcaaagtgcgtcaagttcaacttatgatagtgttggcgcacagttagaaacaggcagcctttcagctggcagttatgtaacaagtttgctgacctcctctgctggtgtggcgttatatgcgggcaaaacggatttagatattctgcaggcggtgtacactaaagcgtatggaagtgcggctccagttgcaacacttcaggctttgctggcatcttctacgcttgccgactcgatttctacagtggttttaaatatcattaattatcatggatttgactccgcaacaacgacatcgcagcttaacttcgattcacaaattaataaaattttatatccagcaaccagtccggcagcggctgctggtccgggtgcatcggatgttcaggccatatatcatgtattgggtctgatatctcaatcgagcaatgttaatttattcggttcacttatcaactcagggaccaaaacgcttgttcaggttgctgataaattcgtagctgatcgctcctatttgacgtctttgaataacaatgacttcttggttcgcgtcttcgcagctagttatgagcgtgcaccatcctcgaccgagctttcgcactatttaggggaactgactggtggaagttctcgaggtcaaattgttgcggaaatcatcactgcgcttcgtgggtcggtcgctcctacagattctgttgcgcagcagcattttaatgatgcgacggttatctatgcgcaaggtcaaatcggtggtcttgcagctcaggaacaggctgcagcagtatatttggcagttcctgagcgcggtattgatgccggtgcgttggataattggagtaaatacctttcattaagcacgacgacatacaaagggtttataagtaatctactgacgtctgatgagttccaacgtaaaggtgcacagctgactggtgataactttatccaacatgtttacaccgctgttcacggtactgcagctacggctgctcagctggcgctttacagtgctttggggactgataaatcggttattacccaggccatcattaatgacctgcggacttcaacggctactgacgcggttaccgtcactcagcagcacgcatttgagtttgatatcggtaccagcctgttgtacaaaaccgcggctagcctgacgactacagccgccggcggtaacgcaaccggcaccgtcaacaccggcgcgtcccaccaaattagtaatgccgaaacggcagttttaacggatgtccaactgaacgccaatgccgccagcaccgtgaacctgaagttcgccgaccatctggcgaatctgactatcaacggcaccagcgcagcaacggtcaacctgtctgacaatggggttaatccaggcgtagatattaccgtcaataacggcaacgtcatcctgaatgccagttcgggtgcggatgacgtagtcgtcacatcgacggcaaacattgcggccggcacggcgcagtttaaccttggtgccggcaatgatagcctgcactgggcagggaacggcgtttccggcggagctaacactgtcgccaacaccgtcaaggctgacggcggcacggggacggactccatttccgccaacttcatcaccaaaaccgtggtgaccaaccaaaacgccctgggcgttcgcaccagtactgtgaccagcaacgccaataacttctcgaatttcgagaagatcgacctgaccggctatatcggcaagtctgttggtacgctgattacgactccgctgatcggttcaccgaccaccaccagcgtcacaacaccgacccacacctttgactttggcctgaccaacggtacatccacggttgaaggcaccacgggcggcacggttacgcagaacgcagctgccaccaatctgggcacgcaaggatttgtgatctccggtttggctaacgtcaacgtcatcaacgccgccggcggcaacgccgcgcagctggaagtgaaaggggacgcgacctccgccagtacgctgaacttcaccttcgtgcagaacgctaccgatcacttcaatatcaacttcgatgcggtgagttccgccaatgtgaatgccggtgctatcaccctgaacagcagcagcagcgccctgttgggtaccgcgctgagcacggtgaatgtggcctcaggcggtactggcagctttgataacattctgtcattggctggcaccaatgcgcaggttcagaccatcaacgtgaccggtgatcacgcgctggatctgaccctgggcagcggtttcagcaacgtgcgtgatatcaatgcgtccaccaataccgctggtctgaatctcgactccagccatggcggtaccggtgacggtatcatcgttcagttgctgaacattctgccgctgagcgtcgtcaccaccaacctgttggcgccagtgttgacggcgttgggcctgaacggttaccaaatgaccgtggaaggttccagtgctgccgataccctgggcgtgattggcaacaccacgctgaccggtggcgcaggtgccaacacctatgacatcaaggcgagtaacacgcaggcgggtgtgaccatcaaggactttagcagcctcaaagacaagattgtcgatgttaaccatggcggcctgactatctccaatgacgccagcggcacagcggttgcggactacggcacacgttccgcagacacattggatgcgctgttggggactctggtgggcggtttgaccaacggcgttatcggcctgctgggcggcattctcggtctggacagcagcaactcgctgacgtcgaaagtgggtgtggcatccgtagtattcagcggtggcggtaatactgccagctcttatgtgattatcgacaacaacgataaccatgcgctggatctcaacgataccgtggtatacctgaccgggcagaaccaccagcaattggtggatactctgcactacgcgtaagtaggggttccagcgggaaataattcccattgaaactgttagccaataaataatacggggtgtgtgaacaccccgtattctttgaattttgtgaaccacgtcattatctctggtttattccctttcgtactaaactcgctttgccctgtctactatttaccctactgttttcatttgtttttttctgtggttcgtgaggcgattttttttgcttacggccttgctgatatccgctttctctacctatagttagaaaaagtatctgcagtctcgagcatgtctggggtgggggttctttaggatttattttatttttttcctttttaggattttccttataagagtccaatgcggattttgactgacagtgcacatgatgtaagggcagaaagtgaatcaatttataccgcgcaatgaaattgcggatgttatacggactcgcagtaaggttttttggaccgttggcatattcaccgcatttattaatctattaatgttagttccttctatctatatgctccaggtttatgaccgggtgcttccttcgcgtaatgaaatcacgttgttaatgctgacgctgatcatgctgggcatgttcggcatgatgtcgctgttggaatacgtgcgcagcatggtggtgatccgtatcggcagtcagctggatatgcgtctcaacacgcgagtctacactgcggcctacgaggcgaatctgaaaaacggttcgtctgacgccggccagatgctgagcgacttgaccaatctgcgccaattccttaccggcagcgcgctgttcgctttctttgatgcgccgtggtttccgatctatctgttggtgatattcctctttaacccttggttggggcttttcgccctggtcggtgcgctgttgctgatcgcattggcggtgatcaacgaaatggtgtcgaaaaagccgctggcggaggccagcaagctgtcgattatgtccggtacgctggccagcaccaatctgcgaaatgccgaagtgatcgaggctttggggatgttgcctaacctgaaacgccggtggttcggtctgcaccagcggtttttgaacagtcagcgcatcgccagcgaacgcgcatcgcgggttacatcgatcaccaagtttgtgcgcatgtcgctgcaatcgctggtgctggggctggggggctggctggcgatcgatgggcacattacgcccggtatgatgatcgccggctccattctgatggggcgaacgctggcgccgattgagcaggttattaacgtctggaagagctacagcgcggcgaagctttcttatggccgattggtcaagctgctggaaacgcacccgcaacgtggtaccggtatgtccttgccgcgtccggaaggggtactcgcagtagaaggcgtcaccgccacgccgccgggctccaaaggcgatgcggtattgcataacgtgagttttgccatccagcccggtgacgtgctggggatcattggcccgagcgcgtcggggaaatcgacgctggcgcgtttgctggtcggcatttggccggtcagtgaagggattgttcggttggataatgccgacatctatcagtggaacaaggatgaattggggccgtatatcggctatctgccgcaggacattgagctgtttgccgggactatcgccgagaatatcgctcgctttaacgatatcgactcagagaaagtcattgaagccgctaagctggccggcgtgcacgaactgatcctgcgtttccctaacggttacgattcggtgctcggcaacggcggcgctgggttgtccggtggacagaaacagcgtatcggcctggcgcgcgccttgtacggcgatccttcgctggtggtattggatgagcctaactccaatctggatgatgcgggcgagaaagcgttgaaccaggcgattatgttcctcaagcaacgtaataaaacggtggttctgattacccatcgcaccaatttgctgtcgatgaccagcaagttgttgctgttggtgaatggcaacgtcaacgcgttcggctcgactcaacaagtgctccaggcgttggccaatgcgcaaaaagcccagacgcaacagcctcagcaagcggtgagggcggtaaattctgagccggatgaaggcaacatcccaaaaacgcaaattaattaagccgtgaattgcctgatggctttattgccatccgcagtttaaaggagttggtatgtcgacgcatattggcgagccgcaagactcgtatattgaagagatcccgcaggacgaacggcggtttacccggatgggctggctggtagtgggaattggtctgttcggatttttggtctgggcagcgttcgcccctctggataaaggggtggcatcaccgggatcggtaaccgtttccggcaaccgcaaaacggtgcaggccccggccagcggcatcatcaagaatatcgcggtgaaagacggcgacaaggtgaaagccggtgaggttctggtgcaattgagccaggtgcaggcacaggctcaggttgattcgctgcgcgatcagtactacaccacgctggccaccgaagggcgtttactggctgaacgcgatggtctgagcaaggtcactttttcccctgttttcacccaggttaaggatcagccgcgcgtggcagaaatcatcgcgttgcaaacgcagctgttcgcctctcgccgccaggggctgcaaagtgaaattgacggttataagcagtcgatggatgggatccgcttccagttgaaaggcctgcaggattcgcgcgccaacaagcagatccaactttccagcctgcgtgagcagatgaacagcatgaagcaactggcggcggacggttatttgccgcgcaaccgttatctggaagtccagcgccagttcgctgaggtgaacagcagcatcgatgaaaccatcgggcggattggtcaattgcaaaagcagctgcaggaatctcagcagcgtatcgatcagcgcttcgccgactatcagcgcgaggtcaggacgcaactggcgcaaacccaaatggacgccagcgagttccgcaacaagctgcaaatggccgacttcgatctgggcaacaccgccatcacctctccggtggatggcaccgtggtcggattgaatattttcactcaggggggcgtcgtgggagcgggggaccacctgatggacgttgtacccagccaggcgacgctggtggtggattctcgcctgaaagtcgatttgatcgacaaggtgtacaacgggttgccggtggatctgatgtttaccgccttcaaccaaaacaaaaccccgaaaattccggggacggtcacgctggtttccgccgaccgcctggtcgacaaagccaatggagaaccttactaccagatgcaggtcacggtctcgccggagggcatgaagatgctcagtggcgaggacatcaagccggggatgccggtcgaggtgttcgtgaaaacgggctcacgctcgctgctgagttatctgtttaaacctattttggatcgcgctcatacttcattaaccgaggaataattttgattcaatcaaaacgacaggctgccggtctggttatcggcacccttttgtttgcgatatctgcgccggtttattcgatagggattttagacgcatattcgctggcattagaaaaggacccgacctaccgggcggctataaaagagaaagaagcgggagatgagaacgaaaacatcggcagggcggggctgctgccgaaggtatcgctgaactaccagaattcgccgcgcaactggcaaacgcagaagtacccggcgagtgacatttttggaaatagccttggagaggcaaccaagcgacaacagtatcgcagccattccagttcgatcacgctgacgcagccgctattcgactatgaagcctacgcccgctacaaagccggcgtggcacagacgatgatgtcggacgagcgctatcgcggcaagttgctggatctcgctgttagggtgattaacgcctatgttgaagtcgcctattccaaggatcaaatcgcgttggccgaagcgcaaaaggcggcttacaaggaacagctgaccttgaacgatcgcctgatgagcgcgggtgaaggcaccattaccgacgtatcggaaacccaggcgcgctacagcctggccgaagcgcaggtaattgaagcacgcgacgcgctggacgccgcacagcgcgagctggaagtgattatcggcatgccgctgaaccaactggatgaattgcaggttttgcggccgggcaagttcaaggtggcaccgctgatcccgtccaagttcgaagattggcagaagatcgcgctggagaacaacccggtgctggccgcgtcgcgtcatggcgtggatgccgccaagtatgatgtcgaaaggaatcgtgcgggctttatgccgcaggttcagctgtatgcttcgcattcggaaaacgattccagcagcgataatacggttaaccagaaataccgtaccgacagcatcggcgtgcaggtcagcatgcctatttattccggcggcggcgtttcggcgtcgacccggcaggcggcggcgcgctatggccaggcgatgtatgaaatggatgcacagacgggcaccacgctcaacgatctgcgcaagcaatacaatttgtgcatcagcagccgcgccaaggtggcggcctatgagttggcggtgcaatcggctactacacaggtgacggcgactcggcagagcgtgctggccgggcaacgtgtcaacgtcgatgtgctcaacgccgaacagcagctctatagcgcccagcgcgatctggcttccgccaagtacgcctacatcaaatcatggatcaccttgctgagcgactccggtacgttggatgaaaaagatgttatgcgggtcgcgcagtattttgcccgcagtcgctagcaacatattcactatgagcattaatctgaaagagcagcgctatgctgctctttttttgttaatacgttatgttatcggcaggttgttcctcctgtgtttttactcgcctggtttatttctgaacataattcctggcaaagggcggtaggttaggggaatttatactttagcaaaatgtagcgattggtcgacgatcgtacgaattttagaatgatgctgctgatgagtggcgtcgtccttataagaacgatgactgagtaaagggtagataatgtccaaactaatccctgtggttatggccggcggtactgggagccgtctgtggccgatgtcgcgagaatcgttccctaaacagtttctttctattgatgacagtgggatgagcctgctgcaacagacgttacagcgcttgtcggggctgggcggtattgaaattgccgctcctttggtcatttgcaatgaggaacatcgttttttggttgccgagcaattgcgtgaaatcggacaattagcgaccaatatcattttagagcccgtagggcgcaataccgcgccggcagtggcgttagccgctcatctggcagcggaagaagacgaagacagcatgctcttggtgctggctgcagatcatctgatcacgaaggtcgataattttcacgcggcgatccagacggctatctcgtttgcaggcaataaccatctggtcacgtttggcattattccggaacatccggaaaccgggtacggctacatcaaacgcggcagtcacctgtccaatgattgtttcaaggttgattcattcgtggaaaaaccacgtttggagaaagcgatcgaatacctcgccagcggagattatagctggaacagcggtatgttcatgtttaagaccgccaagttcttacaggaattgcggcagttcagtcccgacatctttagcacaacccagcagtctgtgggtaagagccaacgcgacatgaattttatccgggttgagcaagacatcttcaaacactgtccaagtgattccatcgactatgcggtgatggaaaaaacgcgtgatgccgtagtgattcccattgatgccggctggagcgacgtcggctcctggtcttcactgtggaacgtttccgaaaaagatccgttgggcaatgtcaacgtgggtgacgttatttcgatcgactccagtgacaattacatttcgtcggagtctgcgttggtggcaaccattgggttggaaaatcttatcgtggtcaacaccactgacgccttgctgatcgctcacaaggataaagtacaggatgtaaagaaagtggttgatgagcttaaaaagcgcaatcttcatcactttcgccaacattccaccgcctaccggccctggggcaagatttgcgacatcgacagcggcacgcacttccaggtgaagaaaatcattgtgcggccaggggagggattgtcggtgcaacgccatctccaccgtgccgaacattggatcgttgtgagtgggacagcaagagttaacgttgatgatcaagagttcttcttgtcggaaaatcagtctaccttcattcctgcgggcagtgtccatacgctagaaaacccgggaaaaatcgatttggaaatgatcgaggtcaggtcggggcgctatctggaagaagatgatattgagcgtttgcaagatcgctatggcagaatttaacagggtttggtaatgcaaaaattgacgtgttttaaagcttatgacatccggggaaagctgggtgaagagctgaatgaggacatcgcgtatcgtattggacgtgcctatggcgagtttttgaagcccaaacggatcgtgttgggctgcgatgtgcggttgaccagtgaaagcctgaaactggcgctggcgaaagggttacaggattcaggcactgatgtgatagacatcggtttaaccggtaccgaagaaatctatttcgccacaacctatttaaaagccgatggtggcgtggaagtgaccgccagccataatcctatcgattacaacggcatgaagttagtgcgcgaaggctctcgcccaatcagcggcgataccgggctacgagcgattcaagaactggcggagaaaaatcactttcaggcgccggcagcaacgcgcggtagctatgtccgccaggacgtattgggggcttatgtagagcacatactgtcttacgtcgacgtgaaaaacttcaagccgttgaagctggtgctcaactcgggcaacggtgcggcagggcatgtgattgatgccatcgaggcgcaactcaaggcgcggggcgtgccgttggaatttatcaaggtgcatcaccagccggacggggctttccctaacggtattcccaaccctttgctgcctgaatgtcgcgcggataccgccgatgcggtgcgtgagcatggcgctgatatggggatcgcgttcgacggcgatttcgatcgctgcttcctgttcgatgaaaaaggcgatttcattgagggttattacatcgtcggcttgctggcggaagccttcctgcagaaacagccgggagcgaagatcatccacgatccgcgtctgagttggaataccgtcgatgtggtcaccgatgcgggtggcgtgcccgtgatgtcgaaaaccggccatgctttcattaaggaacgcatgcgtgcagaagacgccatttatggcggtgagatgagcgcccaccactatttccgtgattttgcttattgtgacagcggcatgatcccgtggctgttggttgccgaactggtcagtgtgaaaggacaaactttggggcaactggtacaggatcgcattgccgcctacccgtcttccggtgagatcaatatcaaactggcacagccggccgtgtccattgaaagcgtcaagcaatactatttggctcaagcggatgaggtagactataccgatggcatcagcatgtcgttcgcaaactggcgtttcaacctgcgttcctccaatacggaacctgtggtgcgtcttaatgtcgaatcgcgcgccgatgttgcgctgatgcaagcgaagaccgacgagattttggcgttgctcggtgcacaaatttaacgcttaatacattgaatagtctaggatgagagcggttttaccgctttctcttcatggtacgcccagaaggttgtatgatgcgcccggtatcgatgagggcgtttttgtcgaatcaagaatgttgcgaagtataagggggggatatggcaattttagttaccggtggtgctggttacatcggatcgcacaccgtgctatcgctcctggagcgtggcgaggacgtcgtggtgttggataatttgtccaactcatctgcggagtcattgcagcgggtggagaaactgtcggggaaagccgcagagttccatcagggagacgttcaggatgccgaatgcctgcagcgcatctttggcgctcatgagatcactgccgtgatccatttcgccggtcttaaggcggtaggggagtcaacgcgcaagccgctggagtattatcagaataacgttaccggcacgctggtgttgttggatgctatgcgtcgtgccggcgtgcacgactttatctttagctcttctgccactgtctatggtgccaattcgccggtaccttatgtagagacgacaccgatcggcgggacaaccagcccttatggaacatcaaagttgatggtggagcagatcctgcaagatttcgctaaagcagagcctcagttctcgattatcgccttgcgttattttaatccggtaggtgctcacgagtccggtttgattggtgaagatcccaatggcattcccaataacctgctgccgtacatctcacaagtggctatcggcaagctggagaagctgggcattttcggtggggattatccgacaaacgatggaacgggagaacgcgattacatccatgtcatggatctggccgaaggccacctgaaggcgatggatcatctgccaaagatcaatggatttaaggcctacaaccttggggctggcgtagggcattcggtgctggcgatggttcaggcgtttgagaaagcgtcaggcgtaacgatcccttatcagatcttgccacgtcgcgatggcgacctgcctgctttctgggccaatgccgatctggcttatcaggagctgggatggaaagtcagccgaggcattgatgatatgatgcgcgatacttggaattggcagcgcactaatccacaaggttaccaaaagtaataccttacagataagctccctctctttgttagatcatgattgcggtttgcgatcgcaatcatgcatcccaccaggatacacattctttaaatattataacgtatttaacaatgcgatcgcgattgttacacgggttaagcccttttcgggcgctgagtgagcgttcatctcagataagcctgaaaaagcggataatctacaggtgttttgatggctaaggtggtagcatacgcagcaaaaatatttattatatccgtcccctatacctgacaaggggggacacgagtatggcttttcgtgccatatgcgaggtacaacagtgtggcgagttttggccatggataaaattcaaaagcaagatcagtcggttggtagctgttgagccaagggcggtagcgtgatttttgcaggccttcgtcaccgtgagaggttgagtaatctcctgtattatcactgccagcgaaatgcccttcgttgctgtttggccttcatctaagcactgcataaggcaacagtaagcgcgataattgaacgttatgtattggtgtgacctaacttaacatattgtatttaaagctttatatatttttagcgtcataaggacaaaaaatgttattacctgtaattatggcaggcggtactggtagccgtttatggccgatgtcacgagaactccaccctaagcagtttttgcgcttgcacagcgtaaattcaatgcttcaggaaacgttgaaacgactcgatggcgtggagatcggtgagcctgttgtaatctgcaacgaagaccaccgttttatggtggctgaacagctgcgtcaaattgatatgttgtcacacaacattatcctggagcccattggcagaaatactgcgccagcgattgctttggctgcattgaatgctaccgcagcaggtaacgatcctatcatgctggtattggcagcagaccatatcatcaaggatgttaatgttttccaccaggcgatcgaagcagcattgccttacgcagcggaaaaaagcctggttacgtttggtattgtgccgacaggtccagaaactggttatggttacatccagcgtggagagtgctgcgatgataaagcggtggccgctaacgtaaaacgttttgttgagaaacctgatctcgcaaccgctcaggcctatgtcgactccggtgaatatttttggaacagtggtatgttcatgttccgtgccaagcgttacctggaggaactggaggcattccgtcccgatatcctggctgcctgtcgccgctcgctggatgataccgaatgtgacaaaaactttatcaatgtcaatcgcgacgcctttgcgagttgcccagacgagtcggtcgattatgcggtaatggaaaaaacacaagatgcggtcatgatcccgctggatgccggttggagtgatgtcggctcatggtctgcattatgggaagtcagccagaaagatggggctggtaatgcattgaccggcgacactttcctgcataatacccgtgattgctatatcaatactgatgaaaaattagttgcggctgttggcgtagataatctggttattgttaacactaaagatgccgttctcgtggttgataagtcgaaagttcaggacgttaaaaaagttgttgagtatctgaaaaaacataagcggagtgaatatcgaagacaccgcgaggtttatcgaccatggggtatttgcgatattttggttgctgaaaagcgttttaatgtcaatcgtatcaccgttaatcccggggaagcattttctctgcaaatgcaccatcaccgcacggaacactgggtggttctttctggtacggctaaagtaacaacgggggataaaacgttcttacttaccgaaaatcagtcgacattcattccaattggggttgtccaccgtttagaaaatcccggaaatattcctttggagctgattgagattcagtcaggctcttatttaggtgatgatgacattatccgtattaaagatcattacggtcgttgctaatttttgaggttttaatgagtgccttaacttgttttaaagcgtatgatatccgtggtcaactaggtgaagagctgaatgaggatattgcctatcgtatcggccgagcttatggcgaatacctgaaacctcagcgcgttatcgtaggtggcgatgtacggctgaccagcgagtctcttaaagtggctctcgccaacggattgcaggatgctggtgttgacgtatatgacattggtatgagtggcactgaagaagtctattttgccactttccatttgaatatggatggtggcattgaagttactgctagccacaatccaatgaattataatggtatgaaactggttaaggcaaatgctcagccgattagtggtgataccggtttatttgcgattaaaaaattagcggaagaaaatacgtttcctgcggtagtgaaggataaatgtggtagttatcaacaaatatccattctcaccgattatgtagatcatttgctgaagtatattgatgcaacagcattgaagccaatgaaattggtcattaactctggaaatggtgctgcaggccatgttatcgacgaaatagagcgacgtttccagcaagaaaatattcccgttacctttgtaaaggttcatcatcaacctgatgggaatttccctaacggtatccctaacccgttattacctgaatgtcgggatgacacagcaaaagccgtgcttgagcatcaggcggatatgggaattgcttttgacggtgatttcgatcgttgtttcctgtttgatgagaagggcgctttcatcgagggctactatatcgttggcctattggcagaagctttcctgcaagccaaccctggctccaagattattcatgatcctcgtctgtcatggaataccatcgatatcgttacccaagctggtggcatccctgttatgtccaaaacggggcatgcctttatcaaggagcgcatgcgcaaagaagatgctatctatggtggcgagatgagtgcgcaccattacttccgtgatttcgcttattgtgacagcggtatgattccatggctattggtagcgggtttactttcagttaaaggcagtgtgttgagtcagctagtgaaggatcgtatggaagcgtatccagcatctggtgagattaatcgcaaattgcctgatgctaaagctgccattgagcgtgttttaggcgtttacaaagatgatgccgtggcttttgacatgacagatggtatcagccttgaattcaatgaatggcgttttaatctgcggacatcgaatactgaacctgttgtacgtttgaatgttgagtcaaaaggggatgttgaattgatgcagaaaaaaactaaagagattctggcgctcttaggcggagaataacgatgaaagaaatgttattagccatctatggttaccggggttttatttggagcagtattaagcgggactttcagtcccgttaccaaaccagcatgttgggagctttatggctggtattgcagccgttagcgatgattttggtatatacactggtattctcagaagtgatgaaggcacggatgcctgataattcaggtccttttgcctatagtatttatctttgctctggggtgctgacgtggggattatttactgaaattcttgataaaagccaaagtgtcttcattactaatgctaacttaataaaaaagctcagcttcccaaaaatttgcttaccggtcattgtgaccgcgtctgcgattttaaacttcgccattatatttagcctgtttttaatttttcttgtttttaccggaaactttcccggggttttattcttctccgtcttacccgttttggctctgcaagttctgttcaccgtcggtctgggtatgacattgggcgtgatgaacgttttcttccgggacgttgggcagtttgttggcgtattattgcaattctggttctggttcacacccatcgtttatgtattaaattcgctgcctgaatgggccagaacatcgctgatgtacaatccaatggcccgagttatgcaagcataccagtcaatatttgcataccaacagcaacctaactggtactcattatggccagtattggttctggccataattttctgtgcgtttggtatgagattgttcaggaaacacgctgcagatatggtggacgagttataatgagttacataaaagtacataatgttggcaaggcatacaaacagtatgcctctaagacagggcgtctgcttgagtggatttcgccatttaacaccgtcaaacataaactaaaatggatcctgcagaacatcagttttcatgttgagcctggtgaggcgttaggcattattggtattaacggtgccggtaaaagtacattactgaaattgattactggcacagcgaaaccaacctgcggcgaaattgctctcgacggtcgagttgcggcattattggagctcggcatgggctttcactcggattttaccgggcgccaaaacgtttatatgtcagggcaactgctgggtatgtccgtcgaaaaaattacggaacttatgccggaaatcgaggcgttcgctgagatcggtgattatatcgatcaaccggttcgtgtttactcaagcggtatgcaagttcgattggcatttagcgttgcaacagcgattcgcccggatattttgattgttgatgaggccttatctgttggtgacgcttattttcagcataagagtttcgagcggatacgtgagtttcgcaagctaggaaccaccctcttgctcgtgtcacatgacaaacaagcgatccaaagcatatgtgatagagctattttgcttaacaaaggcagagtagaaatggagggtgagcctgaagcagtaatggattactataatgccctactcgctgataagcaaaatgtgtcgattcgtcaggttgaaaataatggaaaattgcagacgctctctggctcaggcgaggcaactattaccgatattagtcttcttagtaccgaaggtgaaagtattgaggtggtagcggtagggcaacctgtcaaccttcaggtgaaggtgcatgtcaatgaggctgttcctgaacttgtcgtgggatatttgattaaagaccgattgggacagccggtttttggtaccaatactcatcatctgaaacagccattattcgatttgaaagagaatgaatcgagaaccttttcatttgcgttctctgccaatttgggggttgggtcttactcggttgccgtagcgttacatacggcaggaactcatgttggaaaaaattacgaatggcgcgatctggcggttgttttcaacgttgttaattcaaacgagaaagattttattggagtagcttggttgccccctaagttggagatttttgaatgagtggtaatttttatcgcgtttttgaggaaaaacatcgggggagcgtgcaagatatcaaacaacgcttatctgtatatcttccttttattatggcgttggcaaaaatttacccttcagctgaagttgtcgatgttggctgtgggcgtggagaatggctcgagatcttacgagataatgctattcctgccatgggggttgatctcgatgatggtatgctcgaacgtgctttgcaggtcgggctgaacgtgaagaaaatggactgcctggatttcctccagcagcaggaggacggcagtctactggccatcaccggttttcatatcgcagaacatctgcccttcgagtttttacagtctttggtgaaagaggcgttgcgggtgcttaaacccggtggtttgctgattctggagacgccaaaccccgaaaatgtaagcgttggaacctgttctttttatatggatccgacgcacaaccatccgctgcctccagcgttgctcgaattcattccgaactattacggttttctgagaactaaaatactgcgtttgcaggaaaaagcggcactgagagacgaagagacatcggtatatttggtcgatgtgttgaaaggtgtcagcccagactatagcatgattgcccaaaaagagggtgaggcatcgattgtcggtgagttggacgcctattttgataaagaatatggggttactctcgacggcttaagcgatcgctatgacctacgcttgaataacgagtttaagcgaatgaacacggcgttgcgtgcgcaggcagtgaagttccacgaagtgagtaaccaattggagcgttttcagcaccaattggacaagtcacatcaagagctgatggctgtacatgctaataatcaaagcctacagcagcagctcattgacgtgcatgctaacaatcagagtctgcaacaacagctttttgatgcgcataccagcaattcctggcgtgtgacctccccattgcgttgggtttcatatcaatttaaagcggtacgtgagcaaggcgttaaaactcgagctcgcaaagcagccaaaaaggttttgagaaagggaataaatacggctctggctttattccatgaacatcctaaattcaaagcattcattctttccagcgctagaaagctgggtgcttaccgatttctgcaatctgttttcagacgggttttaatttccgcacctgactatcacgccgatcttatggtgaatgaacgtcatgttgtgtataaggaaaatatgacgagcagagctatcgatatatatgagcagctaaagagaataaataataagaaacacggggattcataatgcgtattgttattgacctgcaaggagcacaaacggaaagccgttttcggggtattggccgttatactctttcgattgcaaaggcaatcatccgtaataacagtcaacacgaaatttttattgctttgtctgcgctgtttcccgaaaccatcgctgaacttaaagcgcaatttgctcgcttagtgccggccgaaaatatcgttatctggtatgcgcctggccctgtcagagcgatggatagaaacaatgcttggcgcagtgagtgtgcagaatatgtgcgtgaagccttcttacataatcttaaacctgatgtcgtttttataaccagtttgttcgaagggcatgtagataatgcggtgacgtcgatcgctaaattaacgccaaaaactaaagtggcgg

(The sequence listing continues in the following parts.)

1. A diagnostic method of determining an infection of a patient with Serratia species potentially resistant to antimicrobial drug, e.g. antibiotic, treatment, comprising the steps of:
a) obtaining or providing a sample containing or suspected of containing at least one Serratia species from the patient;
b) determining the presence of at least one mutation in at least two genes from the group of genes consisting of actP, SMWW4_v1c03050, amiD, SMWW4_v1c38520, selB, SMWW4_v1c13480, bglX, SMWW4_v1c14040, SMWW4_v1c13470, SMWW4_v1c38510, SMWW4_v1c07960, SMWW4_v1c19810, folX, SMWW4_v1c00800, SMWW4_v1c13910, SMWW4_v1c09360, ybiO, SMWW4_v1c25040, znuB, nrdH, lysR, SMWW4_v1c24620, SMWW4_v1c24800, SMWW4_v1c20760, rfaC, SMWW4_v1c21930, SMWW4_v1c12350, galT, alsK, SMWW4_v1c24810, glrK, rihB, yhiN, alx, SMWW4_v1c44490, cnu, SMWW4_v1c30050, vasD, impL, SMWW4_v1c16540, SMWW4_v1c13350, yeaN, SMWW4_v1c40850, kdpA, dppB, ydaN, cysK, yceA, yhjK, and SMWW4_v1c25770, wherein the presence of said at least two mutations is indicative of an infection with an antimicrobial drug, e.g. antibiotic, resistant Serratia strain in said patient.

2. A method of selecting a treatment of a patient suffering from an infection with a potentially resistant Serratia strain, comprising the steps of:
a) obtaining or providing a sample containing or suspected of containing at least one Serratia species from the patient;
b) determining the presence of at least one mutation in at least two genes from the group of genes consisting of actP, SMWW4_v1c03050, amiD, SMWW4_v1c38520, selB, SMWW4_v1c13480, bglX, SMWW4_v1c14040, SMWW4_v1c13470, SMWW4_v1c38510, SMWW4_v1c07960, SMWW4_v1c19810, folX, SMWW4_v1c00800, SMWW4_v1c13910, SMWW4_v1c09360, ybiO, SMWW4_v1c25040, znuB, nrdH, lysR, SMWW4_v1c24620, SMWW4_v1c24800, SMWW4_v1c20760, rfaC, SMWW4_v1c21930, SMWW4_v1c12350, galT, alsK, SMWW4_v1c24810, girK, rihB, yhiN, alx, SMWW4_v1c44490, cnu, SMWW4_v1c30050, vasD, impL, SMWW4_v1c16540, SMWW4_v1c13350, yeaN, SMWW4_v1c40850, kdpA, dppB, ydaN, cysK, yceA, yhjK, and SMWW4_v1c25770, wherein the presence of said at least two mutations is indicative of a resistance to one or more antimicrobial, e.g. antibiotic, drugs;
c) identifying said at least one or more antimicrobial, e.g. antibiotic, drugs; and
d) selecting one or more antimicrobial, e.g. antibiotic, drugs different from the ones identified in step c) and being suitable for the treatment of a Serratia infection.

3. The method of one or more of the preceding claims, where the method involves determining the resistance of Serratia to one or more antimicrobial, e.g. antibiotic, drugs.

4. The method of any one of claims 1 to 3, wherein the antimicrobial, e.g. antibiotic, drug is selected from lactam antibiotics and the presence of a mutation in the following genes is determined: SMWW4_v1c13480; and/or
wherein the antimicrobial, e.g. antibiotic, drug is selected from polyketide antibiotics, preferably tetracycline antibiotics, and the presence of a mutation in the following genes is determined: actP, SMWW4_v1c03050, amiD, SMWW4_v1c38520, selB, SMWW4_v1c13480, bglX, SMWW4_v1c14040, SMWW4_v1c13470, SMWW4_v1c38510, SMWW4_v1c07960, SMWW4_v1c19810, folX, SMWW4_v1c00800, SMWW4_v1c13910, SMWW4_v1c09360, ybiO, SMWW4_v1c25040, znuB, nrdH, lysR, SMWW4_v1c24620, SMWW4_v1c24800, SMWW4_v1c20760, rfaC, SMWW4_v1c21930, SMWW4_v1c12350, galT, alsK, SMWW4_v1c24810, girK, rihB, yhiN, alx, SMWW4_v1c44490, cnu, SMWW4_v1c30050, vasD, impL, SMWW4_v1c16540, SMWW4_v1c13350, yeaN, SMWW4_v1c40850, kdpA, dppB, ydaN, cysK, yceA, yhjK, and/or SMWW4_v1c25770.

5. The method of one or more of the preceding claims, wherein the antimicrobial drug, e.g. antibiotic drug, is selected from the group consisting of Amoxicillin/K Clavulanate (AUG), Ampicillin (AM), Aztreonam (AZT), Cefazolin (CFZ), Cefepime (CPE), Cefotaxime (CFT), Ceftazidime (CAZ), Ceftriaxone (CAX), Cefuroxime (CRM), Cephalotin (CF), Ciprofloxacin (CP), Ertapenem (ETP), Gentamicin (GM), Imipenem (IMP), Levofloxacin (LVX), Meropenem (MER), Piperacillin/Tazobactam (P/T), Ampicillin/Sulbactam (A/S), Tetracycline (TE), Tobramycin (TO), and Trimethoprim/Sulfamethoxazole (T/S).

6. The method of any one of claims 1 to 5, wherein the antibiotic drug is AM and a mutation in at least one of the following nucleotide positions is detected with regard to reference genome NC_020211: 1489693; and/or
wherein the antibiotic drug is TE and a mutation in at least one of the following nucleotide positions is detected with regard to reference genome NC_020211: 342947, 352212, 1816830, 352221, 1817267, 4149382, 86770, 86742, 86744, 1489672, 1489673, 1489681, 1490996, 1545409, 1487651, 1489693, 4148368, 897774, 2154027, 2154042, 2154044, 3716584, 87742, 1532249, 4148381, 1049796, 1601495, 4148825, 2715811, 3025014, 4143093, 4284592, 2154037, 1489972, 2662382, 2687128, 2250726, 4148361, 5161374, 5161396, 2371667, 1371641, 1398352, 4339539, 2687789, 4057459, 2716368, 4712441, 5025276, 4636300, 4812879, 3231402, 3243004, 3244657, 3249370, 3249507, 2716411, 1814748, 1476885, 1049699, 4296135, 4419488, 1347521, 1347533, 156541, 2816076, 3844397, 2018803, 176654, 176722, 176784, 2796043, 2796045.

7. The method of any one of claims 1 to 6, wherein the resistance of a bacterial microorganism belonging to the species Serratia against 1, 2, 3, 4, 5, 6, 7, 8, 9, 10, 11, 12, 13, 14, 15 or 16, 17, 18, 19, 20 or 21 antibiotic drugs is determined.

8. The method of one or more of the preceding claims, wherein determining the nucleic acid sequence information or the presence of a mutation comprises determining a partial sequence or an entire sequence of the at least two genes.

9. The method of one or more of the preceding claims, wherein determining the nucleic acid sequence information or the presence of a mutation comprises determining a partial or entire sequence of the genome of the Serratia species, wherein said partial or entire sequence of the genome comprises at least a partial sequence of said at least two genes.

10. The method of one or more of the preceding claims, wherein determining the nucleic acid sequence information or the presence of a mutation comprises using a next generation sequencing or high throughput sequencing method, preferably wherein a partial or entire genome sequence of the bacterial organism of Serratia species is determined by using a next generation sequencing or high throughput sequencing method.

11. A method of determining an antimicrobial drug, e.g. antibiotic, resistance profile for bacterial microorganisms of Serratia species, comprising:
obtaining or providing a first data set of gene sequences of a plurality of clinical isolates of Serratia species;
providing a second data set of antimicrobial drug, e.g. antibiotic, resistance of the plurality of clinical isolates of Serratia species;
aligning the gene sequences of the first data set to at least one, preferably one, reference genome of Serratia, and/or assembling the gene sequence of the first data set, at least in part;
analyzing the gene sequences of the first data set for genetic variants to obtain a third data set of genetic variants;
correlating the third data set with the second data set and statistically analyzing the correlation; and
determining the genetic sites in the genome of Serratia associated with antimicrobial drug, e.g. antibiotic, resistance.

12. A diagnostic method of determining an infection of a patient with Serratia species potentially resistant to antimicrobial drug treatment, comprising the steps of:
a) obtaining or providing a sample containing or suspected of containing a bacterial microorganism belonging to the species Serratia from the patient;
b) determining the presence of at least one mutation in at least one gene of the bacterial microorganism belonging to the species Serratia as determined by the method of claim 11, wherein the presence of said at least one mutation is indicative of an infection with an antimicrobial drug resistant Serratia strain in said patient.

13. A method of selecting a treatment of a patient suffering from an infection with a potentially resistant Serratia strain, comprising the steps of:
a) obtaining or providing a sample containing or suspected of containing a bacterial microorganism belonging to the species Serratia from the patient;
b) determining the presence of at least one mutation in at least one gene of the bacterial microorganism belonging to the species Serratia as determined by the method of claim 11, wherein the presence of said at least one mutation is indicative of a resistance to one or more antimicrobial drugs;
c) identifying said at least one or more antimicrobial drugs; and
d) selecting one or more antimicrobial drugs different from the ones identified in step c) and being suitable for the treatment of a Serratia infection.

14. A method of acquiring an antimicrobial drug, e.g. antibiotic, resistance profile for bacterial microorganisms of Serratia species, comprising:
obtaining or providing a first data set of gene sequences of a clinical isolate of Serratia species;
providing a second data set of antimicrobial drug, e.g. antibiotic, resistance of a plurality of clinical isolates of Serratia species;
aligning the gene sequences of the first data set to at least one, preferably one, reference genome of Serratia, and/or assembling the gene sequence of the first data set, at least in part;
analyzing the gene sequences of the first data set for genetic variants to obtain a third data set of genetic variants of the first data set;
correlating the third data set with the second data set and statistically analyzing the correlation; and
determining the genetic sites in the genome of Serratia of the first data set associated with antimicrobial drug, e.g. antibiotic, resistance.

15. Computer program product comprising computer executable instructions which, when executed, perform a method according to any one of claims 11 to 14.
